(19) United States
(12) Patent Application Publication
(10) Pub. No.: US 2017/0362613 A1
(43) Pub. Date: Dec. 21, 2017

(54) Recombinant Host Cells For The Production Of 3-Hydroxypropionic Acid

(71) Applicant: NOVOZYMES A/S, Bagsvaerd (DK)

(72) Inventor: Monica TASSONE, West Sacramento, CA (US)

(73) Assignee: Novozymes A/S, Bagsvaerd (DK)

(21) Appl. No.: 15/537,704

(22) PCT Filed: Dec. 18, 2015
(86) PCT No.: PCT/US2015/066859

§ 371 Date: Jun. 19, 2017

Related U.S. Application Data
(60) Provisional application No. 62/094,346, filed on Dec. 19, 2014.

(51) Int. Cl. C12P 7/42; C12N 9/04; C12N 9/88; C07C 51/377

(52) U.S. Cl. CPC C12P 7/42; C12Y 401/01011; C12Y 101/01059; C07C 51/377; C12N 9/0006; C12N 9/88

(57) ABSTRACT

Provided herein are recombinant host cells having an active 3-Hydroxypropionic Acid (3-HP) pathway wherein the host cells comprise a heterologous polynucleotide encoding a 3-hydroxypropionate dehydrogenase (3-HPDH). Also described are methods of using the recombinant cells to produce 3-HP and derivatives of 3-HP (e.g., acrylic acid).

### CROSS-REFERENCE TO RELATED APPLICATIONS

[0001] This application claims priority from U.S. Provisional Patent Application Ser. No. 62/094,346 filed Dec. 19, 2014, the content of which is fully incorporated herein by reference.

### REFERENCE TO A SEQUENCE LISTING

[0002] This application contains a Sequence Listing in computer readable form, which is incorporated herein by reference.

### BACKGROUND

[0003] 3-hydroxypropionic acid (3-HP) is a three carbon carboxylic acid identified by the U.S. Department of Energy as one of the top 12 high-potential building block chemicals that can be made by fermentation. Alternative names for 3-HP, which is an isomer of lactic (2-hydroxypropionic) acid, include ethylene lactic acid and 3-hydroxypropionate. 3-HP is an attractive renewable platform chemical, with 100% theoretical yield from glucose, multiple functional groups that allow it to participate in a variety of chemical reactions, and low toxicity. 3-HP can be used as a substrate to form several commodity chemicals, such as 1,3-propanediol, malonic acid, acrylamide, and acrylic acid. Acrylic acid is a large-volume chemical (>7 billion lbs/year) used to make acrylate esters and superabsorbent polymers, and is currently derived from catalytic oxidation of propylene. Fermentative production of 3-HP would provide a sustainable alternative to petrochemicals as the feedstock for these commercially-significant chemicals, thus reducing energy consumption, dependence on foreign oil supplies, and the production of greenhouse gases.

[0004] 3-hydroxypropionate dehydrogenase (3-HPDH) is an enzyme that converts malonate semialdehyde to 3-HP (FIG. 1). Certain 3-HPDH enzymes utilize the cofactor NADP(H) (EC 1.1.1.298). However, it may be advantageous with some engineered metabolic pathways to express enzymes that utilize the cofactor NAD(H) rather than NADP(H) (e.g., to improve redox balance).

### SUMMARY

[0005] Described herein are recombinant host cells having an active 3-HP pathway, wherein the recombinant cells comprise a heterologous polynucleotide encoding a 3-hydroxypropionate dehydrogenase (3-HPDH), and wherein the cells are capable of producing 3-HP. In some embodiments, the 3-HPDH utilizes an NAD(H) cofactor. In some embodiments, the 3-HPDH has an increased specificity for the cofactor NAD(H) compared to NADP(H).

[0006] In some embodiments, the recombinant cells comprise an active 3-HP pathway that proceeds through a malonate semialdehyde intermediate.

[0007] In some embodiments, the 3-HPDH comprises (a) deletion of the N-terminal mitochondrial target sequence (MTS) corresponding to amino acids 2-16 of SEQ ID NO: 197, and/or (b) at least 60% sequence identity to amino acids 17-354 of SEQ ID NO: 197.

[0008] In some embodiments, the recombinant cells produce a greater amount of 3-HP compared to the cells without the heterologous polynucleotide encoding the encoding a 3-hydroxypropionate dehydrogenase (3-HPDH) when cultivated under identical conditions.

[0009] In some aspects, the recombinant cells comprise one or more (e.g., two, several) heterologous polynucleotides selected from a heterologous polynucleotide encoding a PPC, a heterologous polynucleotide encoding a PYC, a heterologous polynucleotide encoding an AAT, a heterologous polynucleotide encoding an ADC, a heterologous polynucleotide encoding a BAAT or gabT, and a heterologous polynucleotide encoding a 3-HPDH. In some embodiments, the recombinant cells comprise a heterologous polynucleotide encoding an aspartate 1-decarboxylase (ADC).

[0010] In some embodiments, the recombinant cells comprise a disruption to one or more endogenous genes encoding a PDC, ADH, GALE, CYB2A, CYB2B, GPD, GPP, ALD, or PCK. In some embodiments, the recombinant cells comprise a disruption to one or both of an endogenous gene encoding a PDC and an endogenous gene encoding a GPD.

[0011] In some embodiments, the recombinant cells are bacterial or fungal cells. In some embodiments, the recombinant cells are yeast cells such as Issatchenkia, Candida, Kluyveromyces, Pichia, Schizosaccharomyces, Torulaspora, Zygosaccharomyces, or Saccharomyces yeast cells. In some embodiments, the recombinant cells are 3-HP-resistant yeast cells. In some embodiments, the recombinant cells are unable to ferment pentose sugars.

[0012] Also described are methods of producing 3-HP and related compounds. In one aspect is a method of producing 3-HP, comprising: (a) cultivating a recombinant cell described herein in a medium under suitable conditions to produce 3-HP; and (b) recovering the 3-HP. In another aspect is a method of producing acrylic acid or a salt thereof, comprising: (a) cultivating a recombinant cell described herein in a medium under suitable conditions to produce 3-HP; (b) recovering the 3-HP; (c) dehydrating the 3-HP under suitable conditions to produce acrylic acid or a salt thereof; and (d) recovering the acrylic acid or salt thereof.

### BRIEF DESCRIPTION OF THE FIGURES

[0013] FIG. 1 shows a summary of select 3-HP pathways from glucose.

[0014] FIG. 2 shows a sequence alignment of the full length C. albicans 3-HPDH (SEQ ID NO: 197), and a C. albicans 3-HPDH with deletion of the N-terminal mitochondrial target sequence (SEQ ID NO: 199).

[0015] FIG. 3 shows a plasmid map for pMcTs317.

[0016] FIG. 4 shows a plasmid map for pMcTs355.

[0017] FIG. 5 shows a plasmid map for pMcTs354.

### DEFINITIONS

[0018] Abbreviations: 3-HPA, 3-hydroxypropionaldehyde; 3-HPDH, 3-hydroxypropionic acid dehydrogenase; AAM, alanine 2,3-aminomutase; AAT, aspartate aminotransferase; ACC, acetyl-CoA carboxylase; ADC, aspartate 1-decarboxylase; AKG, alpha-ketoglutarate; ALD, aldehyde dehydrogenase; BAAT, β-alanine aminotransferase; BCKA, branched-chain alpha-keto acid decarboxylase; bp, base pairs; CYB2, L-(+)-lactate-cytochrome c oxidoreductase; CYC, iso-2-cytochrome c; EMS, ethane methyl sulfonase; ENO, enolase; gabT, 4-aminobutyrate aminotransferase; GAPDH, glyceraldehyde-3-phosphate dehydrogenase 3; GPD, glycerol 3-phosphate dehydrogenase; GPP, glycerol 3-phosphate phosphatase; HIBADH, 3-hydroxyisobutyrate dehydrogenase; IPDA, indolepyruvate decarboxylase; KGD, alpha-ketoglutarate decarboxylase; LDH, lactate dehydrogenase; MAE, malic enzyme; MDHB, malate dehydrogenase B; OAA, oxaloacetate; PCK, phosphoenolpyruvate carboxykinase; PDC, pyruvate decarboxylase; PDH, pyruvate dehydrogenase; PEP, phosphoenolpyruvate; PGK, phosphoglycerate kinase; PPC, phosphoenolpyruvate carboxylase; PYC, pyruvate carboxylase; RKI, ribose 5-phosphate ketol-isomerase; TAL, transaldolase; TEF1, translation elongation factor-1; TEF2, translation elongation factor-2; TKL, transketolase, XDH, xylitol dehydrogenase; XR, xylose reductase; YP, yeast extract/peptone.

[0019] Active 3-HP pathway: As used herein, a host cell having an “active 3-HP pathway” produces active enzymes necessary to catalyze each reaction of a metabolic pathway in a sufficient amount to produce 3-HP from a fermentable sugar, and therefore is capable of producing 3-HP in measurable yields when cultivated under fermentation conditions in the presence of at least one fermentable sugar. A host cell having an active 3-HP pathway comprises one or more 3-HP pathway genes. A “3-HP pathway gene” as used herein refers to a gene that encodes an enzyme involved in an active 3-HP pathway.

[0020] The active enzymes necessary to catalyze each reaction in an active 3-HP pathway may result from activities of endogenous gene expression, activities of heterologous gene expression, or from a combination of activities of endogenous and heterologous gene expression, as described in more detail herein.

[0021] Allelic variant: The term “allelic variant” means any of two or more alternative forms of a gene occupying the same chromosomal locus. Allelic variation arises naturally through mutation, and may result in polymorphism within populations. Gene mutations can be silent (no change in the encoded polypeptide) or may encode polypeptides having altered amino acid sequences. An allelic variant of a polypeptide is a polypeptide encoded by an allelic variant of a gene.

[0022] Coding sequence: The term “coding sequence” or “coding region” means a polynucleotide sequence, which specifies the amino acid sequence of a polypeptide. The boundaries of the coding sequence are generally determined by an open reading frame, which usually begins with the ATG start codon or alternative start codons such as GTG and TTG and ends with a stop codon such as TAA, TAG, and TGA. The coding sequence may be a sequence of genomic DNA, cDNA, a synthetic polynucleotide, and/or a recombinant polynucleotide.

[0023] Control sequence: The term “control sequence” means a nucleic acid sequence necessary for polypeptide expression. Control sequences may be native or foreign to the polynucleotide encoding the polypeptide, and native or foreign to each other. Such control sequences include, but are not limited to, a leader sequence, polyadenylation sequence, propeptide sequence, promoter sequence, signal peptide sequence, and transcription terminator sequence. The control sequences may be provided with linkers for the purpose of introducing specific restriction sites facilitating ligation of the control sequences with the coding region of the polynucleotide encoding a polypeptide.

[0024] Disruption: The term “disruption” means that a coding region and/or control sequence of a referenced gene is partially or entirely modified (such as by deletion, insertion, and/or substitution of one or more nucleotides) resulting in the absence (inactivation) or decrease in expression, and/or the absence or decrease of enzyme activity of the encoded polypeptide. The effects of disruption can be measured using techniques known in the art such as detecting the absence or decrease of enzyme activity using from cell-free extract measurements referenced herein; or by the absence or decrease of corresponding mRNA (e.g., at least 25% decrease, at least 50% decrease, at least 60% decrease, at least 70% decrease, at least 80% decrease, or at least 90% decrease); the absence or decrease in the amount of corresponding polypeptide having enzyme activity (e.g., at least 25% decrease, at least 50% decrease, at least 60% decrease, at least 70% decrease, at least 80% decrease, or at least 90% decrease); or the absence or decrease of the specific activity of the corresponding polypeptide having enzyme activity (e.g., at least 25% decrease, at least 50% decrease, at least 60% decrease, at least 70% decrease, at least 80% decrease, or at least 90% decrease). Disruptions of a particular gene of interest can be generated by methods known in the art, e.g., by directed homologous recombination (see Methods in Yeast Genetics (1997 edition), Adams, Gottschling, Kaiser, and Stems, Cold Spring Harbor Press (1998)).

[0025] Endogenous gene: The term “endogenous gene” means a gene that is native to the referenced host cell. “Endogenous gene expression” means expression of an endogenous gene.

[0026] Expression: The term “expression” includes any step involved in the production of the polypeptide including, but not limited to, transcription, post-transcriptional modification, translation, post-translational modification, and secretion. Expression can be measured—for example, to detect increased expression—by techniques known in the art, such as measuring levels of mRNA and/or translated polypeptide.

[0027] Expression vector: The term “expression vector” means a linear or circular DNA molecule that comprises a polynucleotide encoding a polypeptide and is operably linked to control sequences, wherein the control sequences provide for expression of the polynucleotide encoding the polypeptide. At a minimum, the expression vector comprises a promoter sequence, and transcriptional and translational stop signal sequences.

[0028] Fermentable medium: The term “fermentable medium” or “fermentation medium” refers to a medium comprising one or more (e.g., two, several) sugars, such as glucose, fructose, sucrose, cellobiose, xylose, xylulose, arabinose, mannose, galactose, and/or soluble oligosaccharides, wherein the medium is capable, in part, of being converted (fermented) by a host cell into a desired product, such as 3-HP. In some instances, the fermentation medium is derived from a natural source, such as sugar cane, starch, or cellulose, and may be the result of pretreating the source by enzymatic hydrolysis (saccharification).

[0029] Heterologous polynucleotide: The term “heterologous polynucleotide” is defined herein as a polynucleotide that is not native to the host cell; a native polynucleotide in which structural modifications have been made to the coding region; a native polynucleotide whose expression is quantitatively altered as a result of a manipulation of the DNA by recombinant DNA techniques, e.g., a different (foreign) promoter; or a native polynucleotide in a host cell having one or more extra copies of the polynucleotide to quantitatively alter expression. A “heterologous gene” is a gene comprising a heterologous polynucleotide.

[0030] High stringency conditions: The term “high stringency conditions” means for probes of at least 100 nucleotides in length, prehybridization and hybridization at 42° C. in 5×SSPE, 0.3% SDS, 200 micrograms/ml sheared and denatured salmon sperm DNA, and 50% formamide, following standard Southern blotting procedures for 12 to 24 hours. The carrier material is finally washed three times each for 15 minutes using 0.2×SSC, 0.2% SDS at 65° C.

[0031] Host cell: The term “host cell” means any cell type that is susceptible to transformation, transfection, transduction, and the like with a nucleic acid construct or expression vector. The term “host cell” encompasses any progeny of a parent cell that is not identical to the parent cell due to mutations that occur during replication. The term “recombinant cell” is defined herein as a non-naturally occurring host cell comprising one or more (e.g., two, several) heterologous polynucleotides.

[0032] 3-HP: The term “3-HP” includes salt and acid forms of “3-hydroxypropionic acid” unless stated otherwise from the context in which it is used.

[0033] 3-hydroxypropionate dehydrogenase: The term “3-hydroxypropionate dehydrogenase” (3-HPDH) means an enzyme that catalyzes the interconversion of malonate semialdehyde to 3-hydroxypropionate (3-HP) in the presence of a NAD(H) or NADP(H) cofactor. Enzymes having 3-HP dehydrogenase activity are classified as EC 1.1.1.59 if they utilize an NAD(H) cofactor, and as EC 1.1.1.298 if they utilize an NADP(H) cofactor. Enzymes classified as EC 1.1.1.298 are alternatively referred to as malonate semialdehyde reductases. One skilled in the art will recognize that 3-hydroxypropionate dehydrogenases may have specificity for more than one substrate. For example, in some instances, the 3-hydroxypropionate dehydrogenase may catalyze both the interconversion of serine to 2-aminomalonate semialdehyde (i.e. a “serine dehydrogenase”) and the interconversion of 3-HP to malonate semialdehyde (i.e., a 3-HPDH).

[0034] 3-hydroxypropionate dehydrogenase activity can be determined according to malonate semi-aldehyde reductase assay described in the Examples. In one aspect, the 3-HPDHs of the present invention have at least 20%, e.g., at least 40%, at least 50%, at least 60%, at least 70%, at least 80%, at least 90%, at least 95%, or at least 100% of the 3-hydroxypropionate dehydrogenase of SEQ ID NO: 199.

[0035] Low stringency conditions: The term “low stringency conditions” means for probes of at least 100 nucleotides in length, prehybridization and hybridization at 42° C. in 5×SSPE, 0.3% SDS, 200 micrograms/ml sheared and denatured salmon sperm DNA, and 25% formamide, following standard Southern blotting procedures for 12 to 24 hours. The carrier material is finally washed three times each for 15 minutes using 0.2×SSC, 0.2% SDS at 50° C.

[0036] Medium stringency conditions: The term “medium stringency conditions” means for probes of at least 100 nucleotides in length, prehybridization and hybridization at 42° C. in 5×SSPE, 0.3% SDS, 200 micrograms/ml sheared and denatured salmon sperm DNA, and 35% formamide, following standard Southern blotting procedures for 12 to 24 hours. The carrier material is finally washed three times each for 15 minutes using 0.2×SSC, 0.2% SDS at 55° C.

[0037] Medium-high stringency conditions: The term “medium-high stringency conditions” means for probes of at least 100 nucleotides in length, prehybridization and hybridization at 42° C. in 5×SSPE, 0.3% SDS, 200 micrograms/ml sheared and denatured salmon sperm DNA, and 35% formamide, following standard Southern blotting procedures for 12 to 24 hours. The carrier material is finally washed three times each for 15 minutes using 0.2×SSC, 0.2% SDS at 60° C.

[0038] Nucleic acid construct: The term “nucleic acid construct” means a polynucleotide comprises one or more (e.g., two, several) control sequences. The polynucleotide may be single-stranded or double-stranded, and may be isolated from a naturally occurring gene, modified to contain segments of nucleic acids in a manner that would not otherwise exist in nature, or synthetic.

[0039] Operably linked: The term “operably linked” means a configuration in which a control sequence is placed at an appropriate position relative to the coding sequence of a polynucleotide such that the control sequence directs expression of the coding sequence.

[0040] Sequence Identity: The relatedness between two amino acid sequences or between two nucleotide sequences is described by the parameter “sequence identity”.

[0041] For purposes described herein, the degree of sequence identity between two amino acid sequences is determined using the Needleman-Wunsch algorithm (Needleman and Wunsch, J. Mol. Biol. 1970, 48, 443-453) as implemented in the Needle program of the EMBOSS package (EMBOSS: The European Molecular Biology Open Software Suite, Rice et al., Trends Genet 2000, 16, 276-277), preferably version 3.0.0 or later. The optional parameters used are gap open penalty of 10, gap extension penalty of 0.5, and the EBLOSUM62 (EMBOSS version of BLOSUM62) substitution matrix. The output of Needle labeled “longest identity” (obtained using the -nobrief option) is used as the percent identity and is calculated as follows:

(Identical Residues×100)/(Length of the Referenced Sequence−Total Number of Gaps in Alignment)

[0042] For purposes described herein, the degree of sequence identity between two deoxyribonucleotide sequences is determined using the Needleman-Wunsch algorithm (Needleman and Wunsch, 1970, supra) as implemented in the Needle program of the EMBOSS package (EMBOSS: The European Molecular Biology Open Software Suite, Rice et al., 2000, supra), preferably version 3.0.0 or later. The optional parameters used are gap open penalty of 10, gap extension penalty of 0.5, and the EDNAFULL (EMBOSS version of NCBI NUC4.4) substitution matrix. The output of Needle labeled “longest identity” (obtained using the -nobrief option) is used as the percent identity and is calculated as follows:

(Identical Deoxyribonucleotides×100)/(Length of Referenced Sequence−Total Number of Gaps in Alignment)

[0043] Very high stringency conditions: The term “very high stringency conditions” means for probes of at least 100 nucleotides in length, prehybridization and hybridization at 42° C. in 5×SSPE, 0.3% SDS, 200 micrograms/ml sheared and denatured salmon sperm DNA, and 50% formamide, following standard Southern blotting procedures for 12 to 24 hours. The carrier material is finally washed three times each for 15 minutes using 0.2×SSC, 0.2% SDS at 70° C.

[0044] Very low stringency conditions: The term “very low stringency conditions” means for probes of at least 100 nucleotides in length, prehybridization and hybridization at 42° C. in 5×SSPE, 0.3% SDS, 200 micrograms/ml sheared and denatured salmon sperm DNA, and 25% formamide, following standard Southern blotting procedures for 12 to 24 hours. The carrier material is finally washed three times each for 15 minutes using 0.2×SSC, 0.2% SDS at 45° C.

[0045] Volumetric productivity: The term “volumetric productivity” refers to the amount of referenced product produced (e.g., the amount of 3-HP produced) per volume of the system used (e.g., the total volume of media and contents therein) per unit of time.

[0046] Reference to “about” a value or parameter herein includes aspects that are directed to that value or parameter per se. For example, description referring to “about X” includes the aspect “X”. When used in combination with measured values, “about” includes a range that encompasses at least the uncertainty associated with the method of measuring the particular value, and can include a range of plus or minus two standard deviations around the stated value.

[0047] As used herein and in the appended claims, the singular forms “a,” “or,” and “the” include plural referents unless the context clearly dictates otherwise. It is understood that the aspects described herein include “consisting” and/or “consisting essentially of” aspects.

[0048] Unless defined otherwise or clearly indicated by context, all technical and scientific terms used herein have the same meaning as commonly understood by one of ordinary skill in the art.

### DETAILED DESCRIPTION

[0049] Described herein, inter alia, are recombinant cells having an active 3-HP pathway which comprise a heterologous polynucleotide encoding a encoding a 3-hydroxypropionate dehydrogenase (3-HPDH). The Applicant has found that the 3-HPDH of SEQ ID NO: 199, which lacks a predicted N-terminal mitochondrial targeting sequence (MTS) of amino acids 2-16 of SEQ ID NO: 197 (See, FIG. 2), has NAD(H) dependent 3-HPDH activity. The Applicant has further found, surprisingly, that expression of the 3-HPDH of SEQ ID NO: 199 lacking the MTS in a recombinant host cell having an active 3-HP pathway results in increased levels of fermented 3-HP.

[0050] The Applicant's finding of expressing the NAD(H)-dependent 3-HPDH of SEQ ID NOs: 199 for 3-HP production may be particularly applicable to host cells that would benefit from decreased levels of NADH (e.g., cells that have disruptions to an endogenous GPD or PDC gene resulting in NADH buildup) in order to improve cellular redox balance.

[0051] Accordingly, in one aspect are recombinant cells, comprising an active 3-HP pathway capable of producing 3-HP and a heterologous polynucleotide encoding a 3-hydroxypropionate dehydrogenase (3-HPDH), wherein the 3-HPDH optionally has a deletion of the N-terminal mitochondrial target sequence (MTS) corresponding to amino acids 2-16 of SEQ ID NO: 197.

[0052] In some embodiments, the 3-HPDH utilizes an NAD(H) cofactor. In some embodiments, the 3-HPDH has an increased specificity for the cofactor NAD(H) compared to NADP(H) (e.g., greater than 2-fold, 5-fold, 10-fold, 20-fold, 50-fold, 100-fold, 200-fold, 500-fold, or 1000-fold specificity for NAD(H) compared to NADP(H)).

[0053] In some embodiments, the recombinant cells comprise an active 3-HP pathway that proceeds through a malonate semialdehyde intermediate. In some aspects, the cells lacks an endogenous 3-HPDH gene or have a disruption of an endogenous 3-HPDH. In one aspect, 3-HPDH is present in the cytosol of the host cells.

[0054] The 3-HPDH can be any 3-HPDH related to the sequences described herein that is suitable for the host cells and their methods of use, such as the 3-HPDHs described by specific SEQ ID numbers, or variants thereof that retain 3-HPDH activity (such as artificial variants or a natural variants from other species).

[0055] In some aspects, the 3-HPDH has at least 20%, e.g., at least 40%, at least 50%, at least 60%, at least 70%, at least 80%, at least 90%, at least 95%, at least 96%, at least 97%, at least 98%, at least 99%, or 100% of the 3-HPDH activity of SEQ ID NO: 199 under the same conditions.

[0056] In one embodiment, the 3-HPDH consists of the amino acid sequence of SEQ ID NO: 199. In another embodiment, the 3-HPDH is a fragment of the polypeptide of SEQ ID NO: 199, wherein the fragment has 3-HPDH activity. In one embodiment, the number of amino acid residues in the fragment is at least 75%, e.g., at least 80%, 85%, 90%, or 95% of the number of amino acid residues in SEQ ID NO: 199.

[0057] The 3-HPDH may also be a variant of the described 3-HPDHs. In one embodiment, the 3-HPDH has at least 60%, e.g., at least 65%, at least 70%, at least 75%, at least 80%, at least 85%, at least 90%, at least 91%, at least 92%, at least 93%, at least 94%, at least 95%, at least 96%, at least 97%, at least 98%, at least 99%, or 100% sequence identity to amino acids 17-354 of SEQ ID NO: 197. In one embodiment, the 3-HPDH sequence differs by no more than ten amino acids, e.g., by no more than five amino acids, by no more than four amino acids, by no more than three amino acids, by no more than two amino acids, or by one amino acid from amino acids 17-354 of SEQ ID NO: 197. In one embodiment, the 3-HPDH comprises or consists of the amino acid sequence of amino acids 17-354 of SEQ ID NO: 197, or an allelic variant, or a fragment thereof having 3-HPDH activity. In one embodiment, the 3-HPDH has an amino acid substitution, deletion, and/or insertion of one or more (e.g., two, several) of amino acids 17-354 of SEQ ID NO: 197. In some embodiments, the total number of amino acid substitutions, deletions and/or insertions is not more than 10, e.g., not more than 9, 8, 7, 6, 5, 4, 3, 2, or 1.

[0058] The amino acid changes are generally of a minor nature, that is conservative amino acid substitutions or insertions that do not significantly affect the folding and/or activity of the protein; small deletions, typically of one to about 30 amino acids; small amino-terminal or carboxyl-terminal extensions, such as an amino-terminal methionine residue; a small linker peptide of up to about 20-25 residues; or a small extension that facilitates purification by changing net charge or another function, such as a poly-histidine tract, an antigenic epitope or a binding domain.

[0059] Examples of conservative substitutions are within the group of basic amino acids (arginine, lysine and histidine), acidic amino acids (glutamic acid and aspartic acid), polar amino acids (glutamine and asparagine), hydrophobic amino acids (leucine, isoleucine and valine), aromatic amino acids (phenylalanine, tryptophan and tyrosine), and small amino acids (glycine, alanine, serine, threonine and methionine). Amino acid substitutions that do not generally alter specific activity are known in the art and are described, for example, by H. Neurath and R. L. Hill, 1979, In, The Proteins, Academic Press, New York. The most commonly occurring exchanges are Ala/Ser, Val/Ile, Asp/Glu, Thr/Ser, Ala/Gly, Ala/Thr, Ser/Asn, Ala/Val, Ser/Gly, Tyr/Phe, Ala/Pro, Lys/Arg, Asp/Asn, Leu/Ile, Leu/Val, Ala/Glu, and Asp/Gly.

[0060] Alternatively, the amino acid changes are of such a nature that the physico-chemical properties of the polypeptides are altered. For example, amino acid changes may improve the thermal stability of the 3-HPDH, alter the substrate specificity, change the pH optimum, and the like.

[0061] Essential amino acids can be identified according to procedures known in the art, such as site-directed mutagenesis or alanine-scanning mutagenesis (Cunningham and Wells, 1989, Science 244: 1081-1085). In the latter technique, single alanine mutations are introduced at every residue in the molecule, and the resultant mutant molecules are tested for 3-HPDH activity to identify amino acid residues that are critical to the activity of the molecule. See also, Hilton et al., 1996, J. Biol. Chem. 271: 4699-4708. The active site of the 3-HPDH or other biological interaction can also be determined by physical analysis of structure, as determined by such techniques as nuclear magnetic resonance, crystallography, electron diffraction, or photoaffinity labeling, in conjunction with mutation of putative contact site amino acids. See, for example, de Vos et al., 1992, Science 255: 306-312; Smith et al., 1992, J. Mol. Biol. 224: 899-904; Wlodaver et al., 1992, FEBS Lett. 309: 59-64. The identities of essential amino acids can also be inferred from analysis of identities with other 3-HPDHs that are related to the referenced 3-HPDH.

[0062] Additional guidance on the structure-activity relationship of the 3-HPDHs herein can be determined using multiple sequence alignment (MSA) techniques well-known in the art. Based on the teachings herein, the skilled artisan could make similar alignments with any number of 3-HPDHs described herein or known in the art. Such alignments aid the skilled artisan to determine potentially relevant domains (e.g., binding domains or catalytic domains), as well as which amino acid residues are conserved and not conserved among the different 3-HPDH sequences. It is appreciated in the art that changing an amino acid that is conserved at a particular position between the disclosed 3-HPDHs will more likely result in a change in biological activity (Bowie et al., 1990, Science 247: 1306-1310: “Residues that are directly involved in protein functions such as binding or catalysis will certainly be among the most conserved”). In contrast, substituting an amino acid that is not highly conserved among the 3-HPDHs will not likely or significantly alter the biological activity.

[0063] Single or multiple amino acid substitutions, deletions, and/or insertions can be made and tested using known methods of mutagenesis, recombination, and/or shuffling, followed by a relevant screening procedure, such as those disclosed by Reidhaar-Olson and Sauer, 1988, Science 241: 53-57; Bowie and Sauer, 1989, Proc. Natl. Acad. Sci. USA 86: 2152-2156; WO 95/17413; or WO 95/22625. Other methods that can be used include error-prone PCR, phage display (e.g., Lowman et al., 1991, Biochemistry 30: 10832-10837; U.S. Pat. No. 5,223,409; WO 92/06204), and region-directed mutagenesis (Derbyshire et al., 1986, Gene 46: 145; Ner et al., 1988, DNA 7: 127).

[0064] Mutagenesis/shuffling methods can be combined with high-throughput, automated screening methods to detect activity of cloned, mutagenized polypeptides expressed by host cells (Ness et al., 1999, Nature Biotechnology 17: 893-896). Mutagenized DNA molecules that encode active 3-HPDHs can be recovered from the host cells and rapidly sequenced using standard methods in the art. These methods allow the rapid determination of the importance of individual amino acid residues in a polypeptide.

[0065] In another embodiment, the heterologous polynucleotide encoding the 3-HPDH comprises a coding sequence having at least 60%, e.g., at least 65%, at least 70%, at least 75%, at least 80%, at least 85%, at least 90%, at least 95%, at least 96%, at least 97%, at least 98%, at least 99%, or 100% sequence identity to nucleotides 49-1062 of SEQ ID NO: 196.

[0066] In one embodiment, the heterologous polynucleotide encoding the 3-HPDH consists of the coding sequence of SEQ ID NO: 198. In another embodiment, the heterologous polynucleotide encoding the 3-HPDH comprises a subsequence of the coding sequence of SEQ ID NO: 198, wherein the subsequence encodes a polypeptide having 3-HPDH activity. In another embodiment, the number of nucleotides residues in the coding subsequence is at least 75%, e.g., at least 80%, 85%, 90%, or 95% of the number of the referenced coding sequence.

[0067] The referenced coding sequence of any related aspect or embodiment described herein can be the native coding sequence or a degenerate sequence, such as a codon-optimized coding sequence designed for a particular host cell.

[0068] The polynucleotide coding sequence of SEQ ID NO: 196 or 198, or a subsequence thereof, as well as the polypeptide of SEQ ID NO: 197 or 199, or a fragment thereof, may be used to design nucleic acid probes to identify and clone DNA encoding a parent from strains of different genera or species according to methods well known in the art. In particular, such probes can be used for hybridization with the genomic DNA or cDNA of a cell of interest, following standard Southern blotting procedures, in order to identify and isolate the corresponding gene therein. Such probes can be considerably shorter than the entire sequence, but should be at least 15, e.g., at least 25, at least 35, or at least 70 nucleotides in length. Preferably, the nucleic acid probe is at least 100 nucleotides in length, e.g., at least 200 nucleotides, at least 300 nucleotides, at least 400 nucleotides, at least 500 nucleotides, at least 600 nucleotides, at least 700 nucleotides, at least 800 nucleotides, or at least 900 nucleotides in length. Both DNA and RNA probes can be used. The probes are typically labeled for detecting the corresponding gene (for example, with ³²P, ³H, ³⁵S, biotin, or avidin).

[0069] A genomic DNA or cDNA library prepared from such other strains may be screened for DNA that hybridizes with the probes described above and encodes a parent. Genomic or other DNA from such other strains may be separated by agarose or polyacrylamide gel electrophoresis, or other separation techniques. DNA from the libraries or the separated DNA may be transferred to and immobilized on nitrocellulose or other suitable carrier material. In order to identify a clone or DNA that hybridizes with SEQ ID NO: 196 or SEQ ID NO: 198, or a subsequence thereof, the carrier material is used in a Southern blot.

[0070] In one aspect, the nucleic acid probe is a polynucleotide comprising SEQ ID NO: 196 or SEQ ID NO: 198; or a subsequence thereof. In another aspect, the nucleic acid probe is a polynucleotide that encodes the polypeptide of SEQ ID NO: 197 or SEQ ID NO: 199; or a fragment thereof.

[0071] For purposes of the probes described above, hybridization indicates that the polynucleotide hybridizes to a labeled nucleic acid probe, or the full-length complementary strand thereof, or a subsequence of the foregoing; under very low to very high stringency conditions. Molecules to which the nucleic acid probe hybridizes under these conditions can be detected using, for example, X-ray film. Stringency and washing conditions are defined as described supra.

[0072] In one embodiment, the 3-HPDH is encoded by a polynucleotide that hybridizes under at least low stringency conditions, e.g., medium stringency conditions, medium-high stringency conditions, high stringency conditions, or very high stringency conditions with the full-length complementary strand of nucleotides 49-1062 of SEQ ID NO: 196. (Sambrook et al., 1989, Molecular Cloning, A Laboratory Manual, 2d edition, Cold Spring Harbor, N.Y.). In another aspect, the 3-HPDH is encoded by a polynucleotide that hybridizes under at least low stringency conditions, e.g., medium stringency conditions, medium-high stringency conditions, high stringency conditions, or very high stringency conditions with the full-length complementary strand of SEQ ID NO: 198.

[0073] The 3-HPDHs may be obtained from microorganisms of any suitable genus, including those readily available within the UniProtKB database (www.uniprot.org).

[0074] The 3-HPDH may be a bacterial 3-HPDH. For example, the 3-HPDH may be a Gram-positive bacterial polypeptide such as a Bacillus, Clostridium, Enterococcus, Geobacillus, Lactobacillus, Lactococcus, Oceanobacillus, Staphylococcus, Streptococcus, or Streptomyces 3-HPDH, or a Gram-negative bacterial polypeptide such as a Campylobacter, E. coli, Flavobacterium, Fusobacterium, Helicobacter, Ilyobacter, Neisseria, Pseudomonas, Salmonella, or Ureaplasma 3-HPDH.

[0075] In one embodiment, the 3-HPDH is a Bacillus alkalophilus, Bacillus amyloliquefaciens, Bacillus brevis, Bacillus circulans, Bacillus clausii, Bacillus coagulans, Bacillus firmus, Bacillus lautus, Bacillus lentus, Bacillus licheniformis, Bacillus megaterium, Bacillus pumilus, Bacillus stearothermophilus, Bacillus subtilis, or Bacillus thuringiensis 3-HPDH.

[0076] In another embodiment, the 3-HPDH is a Streptococcus equisimilis, Streptococcus pyogenes, Streptococcus uberis, or Streptococcus equi subsp. Zooepidemicus 3-HPDH.

[0077] In another embodiment, the 3-HPDH is a Streptomyces achromogenes, Streptomyces avermitilis, Streptomyces coelicolor, Streptomyces griseus, or Streptomyces lividans 3-HPDH.

[0078] The 3-HPDH may be a fungal 3-HPDH. For example, the 3-HPDH may be a yeast 3-HPDH such as a Candida, Kluyveromyces, Pichia, Saccharomyces, Schizosaccharomyces, Yarrowia or Issatchenkia 3-HPDH; or a filamentous fungal 3-HPDH such as an Acremonium, Agaricus, Alternaria, Aspergillus, Aureobasidium, Botryosphaeria, Ceriporiopsis, Chaetomidium, Chrysosporium, Claviceps, Cochliobolus, Coprinopsis, Coptotermes, Corynascus, Cryphonectria, Cryptococcus, Diplodia, Exidia, Filibasidium, Fusarium, Gibberella, Holomastigotoides, Humicola, Irpex, Lentinula, Leptospaeria, Magnaporthe, Melanocarpus, Meripilus, Mucor, Myceliophthora, Neocallimastix, Neurospora, Paecilomyces, Penicillium, Phanerochaete, Piromyces, Poitrasia, Pseudoplectania, Pseudotrichonympha, Rhizomucor, Schizophyllum, Scytalidium, Talaromyces, Thermoascus, Thielavia, Tolypocladium, Trichoderma, Trichophaea, Verticillium, Volvariella, or Xylaria 3-HPDH.

[0079] In another embodiment, the 3-HPDH is a Saccharomyces carlsbergensis, Saccharomyces cerevisiae, Saccharomyces diastaticus, Saccharomyces douglasii, Saccharomyces kluyveri, Saccharomyces norbensis, or Saccharomyces oviformis 3-HPDH.

[0080] In another embodiment, the 3-HPDH is an Acremonium cellulolyticus, Aspergillus aculeatus, Aspergillus awamori, Aspergillus foetidus, Aspergillus fumigatus, Aspergillus japonicus, Aspergillus nidulans, Aspergillus niger, Aspergillus oryzae, Chrysosporium inops, Chrysosporium keratinophilum, Chrysosporium lucknowense, Chrysosporium merdarium, Chrysosporium pannicola, Chrysosporium queenslandicum, Chrysosporium tropicum, Chrysosporium zonatum, Fusarium bactridioides, Fusarium cerealis, Fusarium crookwellense, Fusarium culmorum, Fusarium graminearum, Fusarium graminum, Fusarium heterosporum, Fusarium negundi, Fusarium oxysporum, Fusarium reticulatum, Fusarium roseum, Fusarium sambucinum, Fusarium sarcochroum, Fusarium sporotrichioides, Fusarium sulphureum, Fusarium torulosum, Fusarium trichothecioides, Fusarium venenatum, Humicola grisea, Humicola insolens, Humicola lanuginosa, Irpex lacteus, Mucor miehei, Myceliophthora thermophila, Neurospora crassa, Penicillium funiculosum, Penicillium purpurogenum, Phanerochaete chrysosporium, Thielavia achromatica, Thielavia albomyces, Thielavia albopilosa, Thielavia australeinsis, Thielavia fimeti, Thielavia microspora, Thielavia ovispora, Thielavia peruviana, Thielavia setosa, Thielavia spededonium, Thielavia subthermophila, Thielavia terrestris, Trichoderma harzianum, Trichoderma koningii, Trichoderma longibrachiatum, Trichoderma reesei, or Trichoderma viride 3-HPDH.

[0081] In another aspect, the 3-HPDH is from Candida, such as the Candida albicans 3-HPDH of SEQ ID NO: 197.

[0082] It will be understood that for the aforementioned species, the invention encompasses both the perfect and imperfect states, and other taxonomic equivalents, e.g., anamorphs, regardless of the species name by which they are known. Those skilled in the art will readily recognize the identity of appropriate equivalents.

[0083] Strains of these species are readily accessible to the public in a number of culture collections, such as the American Type Culture Collection (ATCC), Deutsche Sammlung von Mikroorganismen und Zellkulturen GmbH (DSMZ), Centraalbureau Voor Schimmelcultures (CBS), and Agricultural Research Service Patent Culture Collection, Northern Regional Research Center (NRRL).

[0084] Strains of these species are readily accessible to the public in a number of culture collections, such as the American Type Culture Collection (ATCC), Deutsche Sammlung von Mikroorganismen und Zellkulturen GmbH (DSM), Centraalbureau Voor Schimmelcultures (CBS), and Agricultural Research Service Patent Culture Collection, Northern Regional Research Center (NRRL).

[0085] The 3-HPDHs may also be identified and obtained from other sources including microorganisms isolated from nature (e.g., soil, composts, water, silage, etc.) or DNA samples obtained directly from natural materials (e.g., soil, composts, water, silage, etc.) using the above-mentioned probes. Techniques for isolating microorganisms and DNA directly from natural habitats are well known in the art. The polynucleotide encoding a 3-HPDH may then be derived by similarly screening a genomic or cDNA library of another microorganism or mixed DNA sample.

[0086] Once a polynucleotide encoding a 3-HPDH has been detected with a suitable probe as described herein, the sequence may be isolated or cloned by utilizing techniques that are known to those of ordinary skill in the art (see, e.g., Sambrook et al., 1989, supra). Techniques used to isolate or clone polynucleotides encoding 3-HPDHs include isolation from genomic DNA, preparation from cDNA, or a combination thereof. The cloning of the polynucleotides from such genomic DNA can be effected, e.g., by using the well-known polymerase chain reaction (PCR) or antibody screening of expression libraries to detect cloned DNA fragments with shares structural features. See, e.g., Innis et al., 1990, PCR: A Guide to Methods and Application, Academic Press, New York. Other nucleic acid amplification procedures such as ligase chain reaction (LCR), ligated activated transcription (LAT) and nucleotide sequence-based amplification (NASBA) may be used.

[0087] The 3-HPDH may be a fused polypeptide or cleavable fusion polypeptide in which another polypeptide is fused at the N-terminus or the C-terminus of the 3-HPDH. A fused polypeptide may be produced by fusing a polynucleotide encoding another polypeptide to a polynucleotide encoding the 3-HPDH. Techniques for producing fusion polypeptides are known in the art, and include ligating the coding sequences encoding the polypeptides so that they are in frame and that expression of the fused polypeptide is under control of the same promoter(s) and terminator. Fusion proteins may also be constructed using intein technology in which fusions are created post-translationally (Cooper et al., 1993, EMBO J. 12: 2575-2583; Dawson et al., 1994, Science 266: 776-779).

### Active 3-HP Pathway

[0088] Any suitable 3-HP pathway can be used with the recombinant cell having a heterologous 3-HPDH to produce 3-HP. 3-HP pathways, 3-HP pathway genes and corresponding engineered transformants for fermentation of 3-HP are known in the art (e.g., US Publication No. 2012/0135481; U.S. Pat. No. 6,852,517; U.S. Pat. No. 7,309,597; US Pub. No. 2001/0021978; US Pub. No. 2008/0199926; WO02/42418; and WO10/031083; the content of which is hereby incorporated in its entirety). An overview of several known 3-HP pathways is shown in FIG. 1.

[0089] In certain embodiments, the recombinant cells provided herein have an active 3-HP pathway that proceeds through a malonate semialdehyde intermediate. Several 3-HP pathways are known in the art to proceed through a malonate semialdehyde intermediate. For example, the cells may have an active 3-HP pathway that proceeds through PEP or pyruvate, OAA, aspartate, β-alanine, and malonate semialdehyde intermediates (see, e.g., U.S. Pat. No. 7,186,541; FIG. 55). In these embodiments, the recombinant cells comprise a set of 3-HP pathway genes comprising one or more of pyruvate carboxylase (PYC), PEP carboxylase (PPC), aspartate aminotransferase (AAT), aspartate 1-decarboxylase (ADC), β-alanine aminotransferase (BAAT), aminobutyrate aminotransferase (gabT), 3-HP dehydrogenase (3-HPDH), 3-hydroxyisobutyrate dehydrogenase (HIBADH), and 4-hydroxybutyrate dehydrogenase genes. The 3-HP pathway genes may also include a PEP carboxykinase (PCK) gene that has been modified to produce a polypeptide that preferably catalyzes the conversion of PEP to OAA (native PCK genes generally produce a polypeptide that preferably catalyzes the reverse reaction of OAA to PEP).

[0090] In another example, the recombinant cells may have an active 3-HP pathway that proceeds through PEP or pyruvate, OAA, and malonate semialdehyde intermediates (see, e.g., US Pub. No. 2010/0021978, FIG. 1). In these embodiments, the cells comprise a set of 3-HP pathway genes comprising one or more of PPC, PYC, 2-keto acid decarboxylase, alpha-ketoglutarate (AKG) decarboxylase (KG D), branched-chain alpha-keto acid decarboxylase (BCKA), indolepyruvate decarboxylase (IPDA), 3-HPDH, HIBADH, and 4-hydroxybutyrate dehydrogenase genes. The 3-HP pathway genes may also include a PCK gene that has been modified to produce a polypeptide that preferably catalyzes the conversion of PEP to OAA. Further, the 3-HP pathway genes may include a PDC gene and/or benzoylformate decarboxylase gene that has been modified to encode a polypeptide capable of catalyzing the conversion of OAA to malonate semialdehyde.

[0091] In another example, the recombinant cells may have an active 3-HP pathway that proceeds through PEP or pyruvate, OAA, malonyl-CoA, and malonate semialdehyde intermediates, wherein the malonate semialdehyde intermediate is optional (see, e.g., US Pub. No. 2010/0021978, FIG. 2). In these embodiments, the cells comprise a set of 3-HP pathway genes comprising one or more of PPC, PYC, OAA formatelyase, malonyl-CoA reductase, CoA acylating malonate semialdehyde dehydrogenase, 3-HPDH, HIBADH, and 4-hydroxybutyrate dehydrogenase genes. The 3-HP pathway genes may also include a PCK gene that has been modified to produce a polypeptide that preferably catalyzes the conversion of PEP to OAA. Further, the 3-HP pathway genes may include an OAA dehydrogenase gene derived by modifying a 2-keto-acid dehydrogenase gene to produce a polypeptide that catalyzes the conversion of OAA to malonyl-CoA.

[0092] In another example, the recombinant cells may have an active 3-HP pathway that proceeds through pyruvate, acetyl-CoA, malonyl-CoA, and malonate semialdehyde intermediates, wherein the malonate semialdehyde intermediate is optional (see, e.g., U.S. Pat. No. 7,186,541; FIG. 44). In these embodiments, the cells comprise a set of 3-HP pathway genes comprising one or more of pyruvate dehydrogenase (PDH), acetyl-CoA carboxylase (ACC), malonyl-CoA reductase, CoA acylating malonate semialdehyde dehydrogenase, 3-HPDH, HIBADH, and 4-hydroxybutyrate dehydrogenase genes.

[0093] In another example, the recombinant cells may have an active 3-HP pathway that proceeds through pyruvate, alanine, β-alanine, β-alanyl-CoA, acrylyl-CoA, 3-HP-CoA, and malonate semialdehyde intermediates, wherein the β-alanyl-CoA, acrylyl-CoA, 3-HP-CoA, and malonate semialdehyde intermediates are optional β-alanine can be converted to 3-HP via a malonate semialdehyde intermediate or via β-alanyl-CoA, acrylyl-CoA, and 3-HP-CoA intermediates (see, e.g., U.S. Pat. No. 7,309,597, FIG. 1). In these embodiments, the cells comprise a set of 3-HP pathway genes comprising one or more of alanine dehydrogenase, pyruvate/alanine aminotransferase, alanine 2,3 aminomutase, CoA transferase, CoA synthetase, β-alanyl-CoA ammonia lyase, 3-HP-CoA dehydratase, 3-HP-CoA hydrolase, 3-hydroxyisobutyryl-CoA hydrolase, BAAT, 3-HPDH, HIBADH, and 4-hydroxybutyrate dehydrogenase genes.

[0094] Other pathways that do not utilize a malonate semialdehyde intermediate are also known in the art. For example, the recombinant cells may have an active 3-HP pathway that proceeds through PEP or pyruvate, OAA, and malate intermediates (see, e.g., US Pub. No. 2010/0021978; FIG. 4). In these embodiments, the cells comprise a set of 3-HP pathway genes comprising one or more of PPC, PYC, malate dehydrogenase, and malate decarboxylase genes. The 3-HP pathway genes may also include a PCK gene that has been modified to produce a polypeptide that preferably catalyzes the conversion of PEP to OAA.

[0095] In another example, the recombinant cells may have an active 3-HP pathway that proceeds through pyruvate, lactate, lactyl-CoA, acrylyl-CoA, and 3-HP-CoA intermediates (see, e.g., WO02/042418, FIG. 1). In these embodiments, the cells comprise a set of 3-HP pathway genes comprising one or more of LDH, CoA transferase, CoA synthetase, lactyl-CoA dehydratase, 3-HP-CoA dehydratase, 3-HP-CoA hydrolase, and 3-hydroxyisobutyryl-CoA hydrolase genes.

[0096] In another example, the recombinant cells may have an active 3-HP pathway that proceeds through glycerol and 3-HPA intermediates (see, e.g., U.S. Pat. No. 6,852,517). In these embodiments, the cells comprise a set of 3-HP pathway genes comprising one or more of glycerol dehydratase and aldehyde dehydrogenase genes.

[0097] In another example, the recombinant cells may have an active 3-HP pathway that proceeds through PEP or pyruvate, OAA, aspartate, β-alanine, β-alanyl-CoA, acrylyl-CoA, 3-HP-CoA, and alanine intermediates, wherein the OAA, aspartate, and alanine intermediates are optional (PEP or pyruvate can be converted to β-alanine via OAA and aspartate or via alanine) (see WO02/042418, FIG. 54; U.S. Pat. No. 7,309,597, FIG. 1). In these embodiments, the cells comprise a set of 3-HP pathway genes comprising one or more of PPC, PYC, AAT, ADC, CoA transferase, CoA synthetase, β-alanyl-CoA ammonia lyase, 3-HP-CoA dehydratase, 3-HP-CoA hydrolase, 3-hydroxyisobutyrl-CoA hydrolase, alanine dehydrogenase, pyruvate/alanine aminotransferase, and AAM genes. The 3-HP pathway genes may also include a PCK gene that has been modified to produce a polypeptide that preferably catalyzes the conversion of PEP to OAA.

[0098] In certain embodiments, the recombinant cells provided herein express one or more 3-HP pathway genes encoding enzymes selected from the group consisting of ACC (catalyzes the conversion of acetyl-CoA to malonyl-CoA), alanine 2,3 aminomutase (AAM, catalyzes the conversion of alanine to β-alanine), alanine dehydrogenase (catalyzes the conversion of pyruvate to alanine), aldehyde dehydrogenase (catalyzes the conversion of 3-HPA to 3-HP), KGD (catalyzes the conversion of OAA to malonate semialdehyde), AAT (catalyzes the conversion of OAA to aspartate), ADC (catalyzes the conversion of aspartate to β-alanine), BCKA (catalyzes the conversion of OAA to malonate semialdehyde), BAAT (catalyzes the conversion of β-alanine to malonate semialdehyde), 4-aminobutyrate aminotransferase (gabT, catalyzes the conversion of β-alanine to malonate semialdehyde), β-alanyl-CoA ammonia lyase (catalyzes the conversion of β-alanyl-CoA to acrylyl-CoA), Co-A acylating malonate semialdehyde dehydrogenase (catalyzes the conversion of malonyl-CoA to malonate semialdehyde), CoA synthetase (catalyzes the conversion of β-alanine to β-alanyl-CoA or the conversion of lactate to lactyl-CoA), CoA transferase (catalyzes the conversion of β-alanine to β-alanyl-CoA and/or the conversion of lactate to lactyl-CoA), glycerol dehydratase (catalyzes the conversion of glycerol to 3-HPA), IPDA (catalyzes the conversion of OAA to malonate semialdehyde), LDH (catalyzes the conversion of pyruvate to lactate), lactyl-CoA dehydratase (catalyzes the conversion of lactyl-CoA to acrylyl-CoA), malate decarboxylase (catalyzes the conversion of malate to 3-HP), malate dehydrogenase (catalyzes the conversion of OAA to malate), malonyl-CoA reductase (catalyzes the conversion of malonyl-CoA to malonate semialdehyde or 3-HP), OAA formatelyase (also known as pyruvate-formate lyase and ketoacid formate-lyase, catalyzes the conversion of OAA to malonyl-CoA), OAA dehydrogenase (catalyzes the conversion of OAA to malonyl CoA); PPC (catalyzes the conversion of PEP to OAA), pyruvate/alanine aminotransferase (catalyzes the conversion of pyruvate to alanine), PYC (catalyzes the conversion of pyruvate to OAA), PDH (catalyzes the conversion of pyruvate to acetyl-CoA), 2-keto acid decarboxylase (catalyzes the conversion of OAA to malonate semialdehyde), 3-HP-CoA dehydratase (also known as acrylyl-CoA hydratase, catalyzes the conversion of acrylyl-CoA to 3-HP-CoA), 3-HPDH (catalyzes the conversion of malonate semialdehyde to 3-HP), 3-HP-CoA hydrolase (catalyzes the conversion of 3-HP-CoA to 3-HP), HIBADH (catalyzes the conversion of malonate semialdehyde to 3-HP), 3-hydroxyisobutyryl-CoA hydrolase (catalyzes the conversion of 3-HP-CoA to 3-HP), and 4-hydroxybutyrate dehydrogenase (catalyzes the conversion of malonate semialdehyde to 3-HP). For each of these enzyme activities, the reaction of interest in parentheses may be a result of endogenous or heterologous activity.

[0099] Any suitable 3-HP pathway gene, endogenous or heterologous, may be used and expressed in sufficient amount to produce an enzyme involved in a selected active 3-HP pathway. With the complete genome sequence available for now more than 550 species (with more than half of these available on public databases such as the NCBI), including 395 microorganism genomes and a variety of yeast, fungi, plant, and mammalian genomes, the identification of genes encoding the selected 3-HP pathway enzymatic activities taught herein is routine and well known in the art for a selected host. For example, suitable homologues, orthologs, paralogs and nonorthologous gene displacements of known genes, and the interchange of genetic alterations between organisms can be identified in related or distant host to a selected host.

[0100] For recombinant cells without a known genome sequence, sequences for genes of interest (either as overexpression candidates or as insertion sites) can typically be obtained using techniques known in the art. Routine experimental design can be employed to test expression of various genes and activity of various enzymes, including genes and enzymes that function in a 3-HP pathway. Experiments may be conducted wherein each enzyme is expressed in the cell individually and in blocks of enzymes up to and including preferably all pathway enzymes, to establish which are needed (or desired) for improved 3-HP production. One illustrative experimental design tests expression of each individual enzyme as well as of each unique pair of enzymes, and further can test expression of all required enzymes, or each unique combination of enzymes. A number of approaches can be taken, as will be appreciated.

[0101] The recombinant host cells of the invention can be produced by introducing heterologous polynucleotides encoding one or more of the enzymes participating in a 3-HP pathway, as described below. As one in the art will appreciate, in some instances (e.g., depending on the selection of host) the heterologous expression of every gene shown in the 3-HP pathway may not be required for 3-HP production since a host cell may have endogenous enzymatic activity from one or more pathway genes. For example, if a chosen host is deficient in one or more enzymes of a 3-HP pathway, then heterologous polynucleotides for the deficient enzyme(s) are introduced into the host for subsequent expression. Alternatively, if the chosen host exhibits endogenous expression of some pathway genes, but is deficient in others, then an encoding polynucleotide is needed for the deficient enzyme(s) to achieve 3-HP biosynthesis. Thus, a recombinant host cell of the invention can be produced by introducing heterologous polynucleotides to obtain the enzyme activities of a desired biosynthetic pathway or a desired biosynthetic pathway can be obtained by introducing one or more heterologous polynucleotides that, together with one or more endogenous enzymes, produces a desired product such as 3-HP.

[0102] Depending on the 3-HP pathway constituents of a selected recombinant host organism, the host cells of the invention will include at least one heterologous polynucleotide encoding a 3-HPDH and optionally up to all encoding heterologous polynucleotides for the 3-HP pathway. For example, 3-HP biosynthesis can be established in a host deficient in a 3-HP pathway enzyme through heterologous expression of the corresponding polynucleotide. In a host deficient in all enzymes of a 3-HP pathway, heterologous expression of all enzymes in the pathway can be included, although it is understood that all enzymes of a pathway can be expressed even if the host contains at least one of the pathway enzymes.

[0103] A “pyruvate carboxylase gene” or “PYC gene” as used herein refers to any gene that encodes a polypeptide with pyruvate carboxylase activity, meaning the ability to catalyze the conversion of pyruvate, CO₂, and ATP to OAA, ADP, and phosphate. In certain embodiments, a PYC gene may be derived from a yeast source. For example, the PYC gene may be derived from an I. orientalis PYC gene encoding the amino acid sequence set forth in SEQ ID NO: 2. In other embodiments, the gene may encode an amino acid sequence with at least 50%, at least 60%, at least 70%, at least 80%, at least 85%, at least 90%, at least 95%, at least 97%, or at least 99% sequence identity to the amino acid sequence of SEQ ID NO: 2. In certain embodiments, an I. orientalis-derived PYC gene may comprise the nucleotide sequence set forth in SEQ ID NO: 1 or a nucleotide sequence with at least 50%, at least 60%, at least 70%, at least 80%, at least 85%, at least 90%, at least 95%, at least 97%, or at least 99% sequence identity to the nucleotide sequence set forth in SEQ ID NO: 1. In other embodiments, the PYC gene may be derived from a bacterial source. For example, the PYC gene may be derived from one of the few bacterial species that use only PYC and not PPC (see below) for anaplerosis, such as R. sphaeroides, or from a bacterial species that possesses both PYC and PPC, such as R. etli. The amino acid sequences encoded by the PYC genes of R. sphaeroides and R. etli are set forth in SEQ ID NOs: 3 and 4, respectively. A PYC gene may be derived from a gene encoding the amino acid sequence of SEQ ID NOs: 3 or 4, or from a gene encoding an amino acid sequence with at least 50%, at least 60%, at least 70%, at least 80%, at least 85%, at least 90%, at least 95%, at least 97%, or at least 99% sequence identity to the amino acid sequence of SEQ ID NOs: 3 or 4. Alternatively, the PYC gene may be derived from a PYC gene encoding an enzyme that does not have a dependence on acetyl-CoA for activation, such as a P. fluorescens PYC gene encoding the amino acid sequence set forth in SEQ ID NO: 5 (carboxytransferase subunit) or SEQ ID NO: 6 (biotin carboxylase subunit), a C. glutamicum PYC gene of encoding the amino acid sequence set forth in SEQ ID NO: 7, or a gene encoding an amino acid sequence with at least 50%, at least 60%, at least 70%, at least 80%, at least 85%, at least 90%, at least 95%, at least 97%, or at least 99% sequence identity to the amino acid sequence of SEQ ID NOs: 5, 6, or 7. A PYC gene may also be derived from a PYC gene that encodes an enzyme that is not inhibited by aspartate, such as an S. meliloti PYC gene encoding the amino acid sequence set forth in SEQ ID NO: 8 (Sauer FEMS Microbiol Rev 29:765 (2005), or from a gene encoding an amino acid sequence with at least 50%, at least 60%, at least 70%, at least 80%, at least 85%, at least 90%, at least 95%, at least 97%, or at least 99% sequence identity to the amino acid sequence of SEQ ID NO: 8.

[0104] A “PEP carboxylase gene” or “PPC gene” as used herein refers to any gene that encodes a polypeptide with PEP carboxylase activity, meaning the ability to catalyze the conversion of PEP and CO₂ to OAA and phosphate. In certain embodiments, a PPC gene may be derived from a bacterial PPC gene. For example, the PPC gene may be derived from an E. coli PPC gene encoding the amino acid sequence set forth in SEQ ID NO: 10 or an amino acid sequence with at least 50%, at least 60%, at least 70%, at least 80%, at least 85%, at least 90%, at least 95%, at least 97%, or at least 99% sequence identity to the amino acid sequence of SEQ ID NO: 10. In certain embodiments, an E. coli-derived PPC gene may comprise the nucleotide sequence set forth in SEQ ID NO: 9 or a nucleotide sequence with at least 50%, at least 60%, at least 70%, at least 80%, at least 85%, at least 90%, at least 95%, at least 97%, or at least 99% sequence identity to the nucleotide sequence set forth in SEQ ID NO: 9. In other embodiments, a PPC gene may be derived from an “A” type PPC, found in many archea and a limited number of bacteria, that is not activated by acetyl CoA and is less inhibited by aspartate. For example, a PPC gene may be derived from an M. thermoautotrophicum PPC A gene encoding the amino acid sequence set forth in SEQ ID NO: 11, a C. perfringens PPC A gene encoding the amino acid sequence set forth in SEQ ID NO: 12, or a gene encoding an amino acid sequence with at least 50%, at least 60%, at least 70%, at least 80%, at least 85%, at least 90%, at least 95%, at least 97%, or at least 99% sequence identity to the amino acid sequence of SEQ ID NOs: 11 or 12. In certain of these embodiments, the gene may have undergone one or more mutations versus the native gene in order to generate an enzyme with improved characteristics. For example, the gene may have been mutated to encode a PPC polypeptide with increased resistance to aspartate feedback versus the native polypeptide. In other embodiments, the PPC gene may be derived from a plant source.

[0105] An “aspartate aminotransferase gene” or “AAT gene” as used herein refers to any gene that encodes a polypeptide with aspartate aminotransferase activity, meaning the ability to catalyze the conversion of OAA to aspartate. Enzymes having aspartate aminotransferase activity are classified as EC 2.6.1.1. In certain embodiments, an AAT gene may be derived from a yeast source such as I. orientalis or S. cerevisiae. For example, the AAT gene may be derived from an I. orientalis AAT gene encoding the amino acid sequence set forth in SEQ ID NO: 14 or an S. cerevisiae AAT2 gene encoding the amino acid sequence set forth in SEQ ID NO: 15. In other embodiments, the gene may encode an amino acid sequence with at least 50%, at least 60%, at least 70%, at least 80%, at least 85%, at least 90%, at least 95%, at least 97%, or at least 99% sequence identity to the amino acid sequence of SEQ ID NOs: 14 or 15. In certain embodiments, an I. orientalis-derived AAT gene may comprise the nucleotide sequence set forth in SEQ ID NO: 13 or a nucleotide sequence with at least 50%, at least 60%, at least 70%, at least 80%, at least 85%, at least 90%, at least 95%, at least 97%, or at least 99% sequence identity to the nucleotide sequence set forth in SEQ ID NO: 13. In other embodiments, the AAT gene may be derived from a bacterial source. For example, the AAT gene may be derived from an E. coli aspC gene encoding a polypeptide comprising the amino acid sequence set forth in SEQ ID NO: 16. In other embodiments, the gene may encode an amino acid sequence with at least 50%, at least 60%, at least 70%, at least 80%, at least 85%, at least 90%, at least 95%, at least 97%, or at least 99% sequence identity to the amino acid sequence of SEQ ID NO: 16.

[0106] An “aspartate decarboxylase gene” or “ADC gene” as used herein refers to any gene that encodes a polypeptide with aspartate decarboxylase activity, meaning the ability to catalyze the conversion of aspartate to β-alanine. Enzymes having aspartate decarboxylase activity are classified as EC 4.1.1.11. In certain embodiments, an ADC gene may be derived from a bacterial source.

[0107] In some embodiments, the ADC gene may be derived from an S. avermitilis panD gene encoding the amino acid sequence set forth in SEQ ID NO: 17. In some embodiments, the ADC gene may encode an amino acid sequence with at least 50%, at least 60%, at least 70%, at least 80%, at least 85%, at least 90%, at least 95%, at least 97%, or at least 99% sequence identity to the amino acid sequence of SEQ ID NO: 17. In certain embodiments, an S. avermitilis-derived ADC gene may comprise the nucleotide sequence set forth in any one of SEQ ID NOs: 130, 145, 146, or 147; or a nucleotide sequence with at least 50%, at least 60%, at least 70%, at least 80%, at least 85%, at least 90%, at least 95%, at least 97%, or at least 99% sequence identity to the nucleotide sequence set forth in any one of SEQ ID NOs: 130, 145, 146, or 147.

[0108] In other embodiments, the ADC gene may be derived from a C. acetobutylicum panD gene encoding the amino acid sequence set forth in SEQ ID NO: 18. In some embodiments, the ADC gene may encode an amino acid sequence with at least 50%, at least 60%, at least 70%, at least 80%, at least 85%, at least 90%, at least 95%, at least 97%, or at least 99% sequence identity to the amino acid sequence of SEQ ID NO: 18. In certain embodiments, a C. acetobutylicum-derived ADC gene may comprise the nucleotide sequence set forth in SEQ ID NO: 131, or a nucleotide sequence with at least 50%, at least 60%, at least 70%, at least 80%, at least 85%, at least 90%, at least 95%, at least 97%, or at least 99% sequence identity to the nucleotide sequence set forth in SEQ ID NO: 131.

[0109] In other embodiments, the ADC gene may be derived from a H. pylori ADC gene encoding the amino acid sequence set forth in SEQ ID NO: 133. In some embodiments, the ADC gene may encode an amino acid sequence with at least 50%, at least 60%, at least 70%, at least 80%, at least 85%, at least 90%, at least 95%, at least 97%, or at least 99% sequence identity to the amino acid sequence of SEQ ID NO: 133. In certain embodiments, a H. pylori-derived ADC gene may comprise the nucleotide sequence set forth in SEQ ID NO: 133, or a nucleotide sequence with at least 50%, at least 60%, at least 70%, at least 80%, at least 85%, at least 90%, at least 95%, at least 97%, or at least 99% sequence identity to the nucleotide sequence set forth in SEQ ID NO: 133.

[0110] In other embodiments, the ADC gene may be derived from a Bacillus sp. TS25 ADC gene encoding the amino acid sequence set forth in SEQ ID NO: 135. In some embodiments, the ADC gene may encode an amino acid sequence with at least 50%, at least 60%, at least 70%, at least 80%, at least 85%, at least 90%, at least 95%, at least 97%, or at least 99% sequence identity to the amino acid sequence of SEQ ID NO: 135. In certain embodiments, a Bacillus sp. TS25-derived ADC gene may comprise the nucleotide sequence set forth in SEQ ID NO: 134, or a nucleotide sequence with at least 50%, at least 60%, at least 70%, at least 80%, at least 85%, at least 90%, at least 95%, at least 97%, or at least 99% sequence identity to the nucleotide sequence set forth in SEQ ID NO: 134.

[0111] In other embodiments, the ADC gene may be derived from a C. glutamicum ADC gene encoding the amino acid sequence set forth in SEQ ID NO: 137. In some embodiments, the ADC gene may encode an amino acid sequence with at least 50%, at least 60%, at least 70%, at least 80%, at least 85%, at least 90%, at least 95%, at least 97%, or at least 99% sequence identity to the amino acid sequence of SEQ ID NO: 137. In certain embodiments, a C. glutamicum-derived ADC gene may comprise the nucleotide sequence set forth in SEQ ID NO: 136, or a nucleotide sequence with at least 50%, at least 60%, at least 70%, at least 80%, at least 85%, at least 90%, at least 95%, at least 97%, or at least 99% sequence identity to the nucleotide sequence set forth in SEQ ID NO: 136.

[0112] In other embodiments, the ADC gene may be derived from a B. licheniformis ADC gene encoding the amino acid sequence set forth in SEQ ID NO: 139. In some embodiments, the ADC gene may encode an amino acid sequence with at least 50%, at least 60%, at least 70%, at least 80%, at least 85%, at least 90%, at least 95%, at least 97%, or at least 99% sequence identity to the amino acid sequence of SEQ ID NO: 139. In certain embodiments, a B. licheniformis-derived ADC gene may comprise the nucleotide sequence set forth in any one of SEQ ID NOs: 138, 148, 149, 150, or 151; or a nucleotide sequence with at least 50%, at least 60%, at least 70%, at least 80%, at least 85%, at least 90%, at least 95%, at least 97%, or at least 99% sequence identity to the nucleotide sequence set forth in any one of SEQ ID NOs: 138, 148, 149, 150, or 151.

[0113] In other embodiments, the ADC gene may be derived from the Class Insecta (insect) ADC gene, e.g., as described in PCT/US2014/049286 (the content of which is incorporated herein by reference). For example, in some embodiments, the ADC gene may encode an amino acid sequence of the Aedes aegypti ADC of SEQ ID NO: 162, the Culex quinquefasciatus ADC of SEQ ID NO: 163, the Anopheles gambiae ADC of SEQ ID NO: 164, the Tribolium castaneum ADC of SEQ ID NO: 165, the Attagenus smirnovi ADC of SEQ ID NO: 166, the Acyrthosiphon pisum ADC of SEQ ID NO: 167, the Drosophila sechellia ADC of SEQ ID NO: 168, the Drosophila melanogaster ADC of SEQ ID NO: 169, the Danaus plexippus ADC of SEQ ID NO: 170, the Drosophila yakuba ADC of SEQ ID NO: 171, the Drosophila erecta ADC of SEQ ID NO: 172, the Papilio xuthus ADC of SEQ ID NO: 173, the Drosophila persimilis ADC of SEQ ID NO: 174, the Bombyx mori ADC of SEQ ID NO: 175, the Drosophila ananassae ADC of SEQ ID NO: 176, the Drosophila mojavensis ADC of SEQ ID NO: 177, the Drosophila grimshawi ADC of SEQ ID NO: 178, the Biston betularia ADC of SEQ ID NO: 179, the Drosophila willistoni ADC of SEQ ID NO: 180, the Apis mellifera ADC of SEQ ID NO: 181, the Drosophila virilis ADC of SEQ ID NO: 182, the Nasonia vitripennis ADC of SEQ ID NO: 183, the Bicyclus anynana ADC of SEQ ID NO: 184, the Harpegnathos saltator ADC of SEQ ID NO: 185, the Acromyrmex echinatior ADC of SEQ ID NO: 186, the Camponotus floridanus ADC of SEQ ID NO: 187, the Pediculus humanus ADC of SEQ ID NO: 188, the Atta cephalotes ADC of SEQ ID NO: 189, the Meligethes aeneus ADC of SEQ ID NO: 190, or the Solenopsis invicta ADC of SEQ ID NO: 191. In another aspect is a recombinant cell comprising an aspartate 1-decarboxylase (ADC) of the Class Bivalvia, Branchiopoda, Gastropoda, or Leptocardii, such as the Daphnia pulex ADC of SEQ ID NO: 192, the Lottia gigantea ADC of SEQ ID NO: 193, the Branchiostoma floridae ADC of SEQ ID NO: 194, or the Crassostrea gigas ADC of SEQ ID NO: 195. In some embodiments, the ADC gene may encode an amino acid sequence with at least 50%, at least 60%, at least 70%, at least 80%, at least 85%, at least 90%, at least 95%, at least 97%, or at least 99% sequence identity to the amino acid sequence of any one of SEQ ID NOs: 162-195.

[0114] A “β-alanine aminotransferase gene” or “BAAT gene” as used herein refers to any gene that encodes a polypeptide with β-alanine aminotransferase activity, meaning the ability to catalyze the conversion of β-alanine to malonate semialdehyde. Enzymes having β-alanine aminotransferase activity are classified as EC 2.6.1.19. In certain embodiments, a BAAT gene may be derived from a yeast source. For example, a BAAT gene may be derived from the I. orientalis homolog to the pyd4 gene encoding the amino acid sequence set forth in SEQ ID NO: 20. In some embodiments, the BAAT gene may encode an amino acid sequence with at least 50%, at least 60%, at least 70%, at least 80%, at least 85%, at least 90%, at least 95%, at least 97%, or at least 99% sequence identity to the amino acid sequence of SEQ ID NO: 20. In certain embodiments, an I. orientalis-derived BAAT gene may comprise the nucleotide sequence set forth in SEQ ID NO: 19 or a nucleotide sequence with at least 50%, at least 60%, at least 70%, at least 80%, at least 85%, at least 90%, at least 95%, at least 97%, or at least 99% sequence identity to the nucleotide sequence set forth in SEQ ID NO: 19. In other embodiments, the BAAT gene may be derived from the S. kluyveri pyd4 gene encoding the amino acid sequence set forth in SEQ ID NO: 21. In some embodiments, the BAAT gene may encode an amino acid sequence with at least 50%, at least 60%, at least 70%, at least 80%, at least 85%, at least 90%, at least 95%, at least 97%, or at least 99% sequence identity to the amino acid sequence of SEQ ID NO: 21. In certain embodiments, a S. kluyveri-derived BAAT gene may comprise the nucleotide sequence set forth in SEQ ID NO: 142 or a nucleotide sequence with at least 50%, at least 60%, at least 70%, at least 80%, at least 85%, at least 90%, at least 95%, at least 97%, or at least 99% sequence identity to the nucleotide sequence set forth in SEQ ID NO: 142. In other embodiments, the BAAT gene may be derived from a bacterial source. For example, a BAAT gene may be derived from an S. avermitilis BAAT gene encoding the amino acid sequence set forth in SEQ ID NO: 22. In some embodiments, the BAAT gene may encode an amino acid sequence with at least 50%, at least 60%, at least 70%, at least 80%, at least 85%, at least 90%, at least 95%, at least 97%, or at least 99% sequence identity to the amino acid sequence of SEQ ID NO: 22. In certain embodiments, a S. avermitilis-derived BAAT gene may comprise the nucleotide sequence set forth in SEQ ID NO: 140 or a nucleotide sequence with at least 50%, at least 60%, at least 70%, at least 80%, at least 85%, at least 90%, at least 95%, at least 97%, or at least 99% sequence identity to the nucleotide sequence set forth in SEQ ID NO: 140.

[0115] A BAAT gene may also be a “4-aminobutyrate aminotransferase” or “gabT gene” meaning that it has native activity on 4-aminobutyrate as well as β-alanine. Alternatively, a BAAT gene may be derived by random or directed engineering of a native gabT gene from a bacterial or yeast source to encode a polypeptide with BAAT activity. For example, a BAAT gene may be derived from the S. avermitilis gabT encoding the amino acid sequence set forth in SEQ ID NO: 23. In some embodiments, the S. avermitilis-derived BAAT gene may encode an amino acid sequence with at least 50%, at least 60%, at least 70%, at least 80%, at least 85%, at least 90%, at least 95%, at least 97%, or at least 99% sequence identity to the amino acid sequence of SEQ ID NO: 23. In other embodiments, a BAAT gene may be derived from the S. cerevisiae gabT gene UGA1 encoding the amino acid sequence set forth in SEQ ID NO: 24. In some embodiments, the S. cerevisiae-derived BAAT gene may encode an amino acid sequence with at least 50%, at least 60%, at least 70%, at least 80%, at least 85%, at least 90%, at least 95%, at least 97%, or at least 99% sequence identity to the amino acid sequence of SEQ ID NO: 24. In certain embodiments, an S. cerevisiae-derived BAAT gene may comprise the nucleotide sequence set forth in SEQ ID NO: 141 or a nucleotide sequence with at least 50%, at least 60%, at least 70%, at least 80%, at least 85%, at least 90%, at least 95%, at least 97%, or at least 99% sequence identity to the nucleotide sequence set forth in SEQ ID NO: 141.

[0116] In addition to a 3-HPDH gene used to encode the 3-HPDH of SEQ ID NO: 199 (or a polypeptide related to SEQ ID NO: 199 or related to amino acids 17-354 of SEQ ID NO: 197), the recombinant cell may optionally comprise one or more (e.g., two, several) additional 3-HPDH gene(s). In certain embodiments, the additional 3-HPDH gene may be derived from a yeast source. For example, the additional 3-HPDH gene may be derived from the I. orientalis homolog to the YMR226C gene encoding the amino acid sequence set forth in SEQ ID NO: 26. In some embodiments, the additional 3-HPDH gene may encode an amino acid sequence with at least 50%, at least 60%, at least 70%, at least 80%, at least 85%, at least 90%, at least 95%, at least 97%, or at least 99% sequence identity to the amino acid sequence of SEQ ID NO: 26. In certain embodiments, the additional I. orientalis-derived 3-HPDH gene may comprise the nucleotide sequence set forth in SEQ ID NO: 25 or a nucleotide sequence with at least 50%, at least 60%, at least 70%, at least 80%, at least 85%, at least 90%, at least 95%, at least 97%, or at least 99% sequence identity to the nucleotide sequence set forth in SEQ ID NO: 25. In other embodiments, the additional 3-HPDH gene may be derived from the S. cerevisiae YMR226C gene encoding the amino acid sequence set forth in SEQ ID NO: 129. In some embodiments, the additional 3-HPDH gene may encode an amino acid sequence with at least 50%, at least 60%, at least 70%, at least 80%, at least 85%, at least 90%, at least 95%, at least 97%, or at least 99% sequence identity to the amino acid sequence of SEQ ID NO: 129. In certain embodiments, the additional S. cerevisiae-derived 3-HPDH gene may comprise the nucleotide sequence set forth in SEQ ID NO: 144 or a nucleotide sequence with at least 50%, at least 60%, at least 70%, at least 80%, at least 85%, at least 90%, at least 95%, at least 97%, or at least 99% sequence identity to the nucleotide sequence set forth in SEQ ID NO: 144.

[0117] In other embodiments, the additional 3-HPDH gene may be derived from a bacterial source. For example, a 3-HPDH gene may be derived from an E. coli ydfG gene encoding the amino acid sequence in SEQ ID NO: 27. In some embodiments, the additional 3-HPDH gene may encode an amino acid sequence with at least 50%, at least 60%, at least 70%, at least 80%, at least 85%, at least 90%, at least 95%, at least 97%, or at least 99% sequence identity to the amino acid sequence of SEQ ID NO: 27. In certain embodiments, the additional E. coli-derived 3-HPDH gene may comprise the nucleotide sequence set forth in SEQ ID NO: 143 or a nucleotide sequence with at least 50%, at least 60%, at least 70%, at least 80%, at least 85%, at least 90%, at least 95%, at least 97%, or at least 99% sequence identity to the nucleotide sequence set forth in SEQ ID NO: 143. In other embodiments, the additional 3-HPDH gene may be derived from an M. sedula malonate semialdehyde reductase gene encoding the amino acid sequence set forth in SEQ ID NO: 29. In some embodiments, the additional 3-HPDH gene may encode an amino acid sequence with at least 50%, at least 60%, at least 70%, at least 80%, at least 85%, at least 90%, at least 95%, at least 97%, or at least 99% sequence identity to the amino acid sequence set forth in SEQ ID NO: 29. In certain embodiments, the additional M. sedula-derived 3-HPDH gene may comprise the nucleotide sequence set forth in SEQ ID NO: 152 or a nucleotide sequence with at least 50%, at least 60%, at least 70%, at least 80%, at least 85%, at least 90%, at least 95%, at least 97%, or at least 99% sequence identity to the nucleotide sequence set forth in SEQ ID NO: 152.

[0118] In certain embodiments, the additional 3-HPDH gene may be a natural or engineered gene having an increased specificity for NAD(H) compared to NADP(H). 3-HPDA variants having increased specificity for NAD(H) are described in WO 2013/049073 (the content of which is incorporated herein by reference).

[0119] A “3-hydroxyisobutyrate dehydrogenase gene” or “HIBADH gene” as used herein refers to any gene that encodes a polypeptide with 3-hydroxyisobutyrate dehydrogenase activity, meaning the ability to catalyze the conversion of 3-hydroxyisobutyrate to methylmalonate semialdehyde. Enzymes having 3-hydroxyisobutyrate dehydrogenase activity are classified as EC 1.1.1.31. Some 3-hydroxyisobutyrate dehydrogenases also have 3-HPDH activity. In certain embodiments, an HIBADH gene may be derived from a bacterial source. For example, an HIBADH gene may be derived from an A. faecalis M3A gene encoding the amino acid sequence set forth in SEQ ID NO: 28, a P. putida KT2440 or E23440 mmsB gene encoding the amino acid sequence set forth in SEQ ID NO: 30 or SEQ ID NO: 31, respectively, or a P. aeruginosa PAO1 mmsB gene encoding the amino acid sequence set forth in SEQ ID NO: 32. In certain embodiments, an HIBADH gene may encode an amino acid sequence with at least 50%, at least 60%, at least 70%, at least 80%, at least 85%, at least 90%, at least 95%, at least 97%, or at least 99% sequence identity to the amino acid sequence set forth in SEQ ID NOs: 28, 30, 31, or 32.

[0120] A “4-hydroxybutyrate dehydrogenase gene” as used herein refers to any gene that encodes a polypeptide with 4-hydroxybutyrate dehydrogenase activity, meaning the ability to catalyze the conversion of 4-hydroxybutanoate to succinate semialdehyde. Enzymes having 4-hydroxybutyrate dehydrogenase activity are classified as EC 1.1.1.61. Some 4-hydroxybutyrate dehydrogenases also have 3-HPDH activity. In certain embodiments, a 4-hydroxybutyrate dehydrogenase gene may be derived from a bacterial source. For example, a 4-hydroxybutyrate dehydrogenase gene may be derived from a R. eutropha H16 4hbd gene encoding the amino acid sequence set forth in SEQ ID NO: 33 or a C. kluyveri DSM 555 hbd gene encoding the amino acid sequence set forth in SEQ ID NO: 34. In other embodiments, the gene may encode an amino acid sequence with at least 50%, at least 60%, at least 70%, at least 80%, at least 85%, at least 90%, at least 95%, at least 97%, or at least 99% sequence identity to the amino acid sequence set forth in SEQ ID NOs: 33 or 34.

[0121] A “PEP carboxykinase gene” or “PCK gene” as used herein refers to any gene that encodes a polypeptide with PEP carboxykinase activity, meaning the ability to catalyze the conversion of PEP, CO₂, and ADP or GDP to OAA and ATP or GTP, or vice versa. Enzymes having PEP carboxykinase activity are classified as EC 4.1.1.32 (GTP/GDP utilizing) and EC 4.1.1.49 (ATP/ADP utilizing). In certain embodiments, a PCK gene may be derived from a yeast source. In other embodiments, a PCK gene may be derived from a bacterial source, and in certain of these embodiments the gene may be derived from a bacteria in which the PCK reaction favors the production of OAA rather than the more common form of the reaction where decarboxylation is dominant. For example, a PCK gene may be derived from an M. succiniciproducens PCK gene encoding the amino acid sequence set forth in SEQ ID NO: 35, an A. succiniciproducens PCK gene encoding the amino acid sequence set forth in SEQ ID NO: 36, an A. succinogenes PCK gene encoding the amino acid sequence set forth in SEQ ID NO: 37, or an R. eutropha PCK gene encoding the amino acid sequence set forth in SEQ ID NO: 38. In other embodiments, a PCK gene has undergone one or more mutations versus the native gene from which it was derived, such that the resultant gene encodes a polypeptide that preferably catalyzes the conversion of PEP to OAA. For example, a PCK gene may be derived from an E. coli K12 strain PCK gene encoding the amino acid sequence set forth in SEQ ID NO: 39, where the gene has been mutated to preferably catalyze the conversion of PEP to OAA. In other embodiments the conversion of PEP to OAA is catalyzed by a PEP carboxytransphosphorylase such as is found in propionic acid bacteria (e.g., P. shermanii, A. woodii) which use inorganic phosphate and diphosphate rather than ATP/ADP or GTP/GDP.

[0122] A “malate dehydrogenase gene” as used herein refers to any gene that encodes a polypeptide with malate dehydrogenase activity, meaning the ability to catalyze the conversion of OAA to malate. In certain embodiments, a malate dehydrogenase gene may be derived from a bacterial or yeast source.

[0123] A “malate decarboxylase gene” as used herein refers to any gene that encodes a polypeptide with malate decarboxylase activity, meaning the ability to catalyze the conversion of malate to 3-HP. Malate decarboxylase activity is not known to occur naturally. Therefore, a malate decarboxylase gene may be derived by incorporating one or more mutations into a native source gene that encodes a polypeptide with acetolactate decarboxylase activity. Polypeptides with acetolactate decarboxylase activity catalyze the conversion of 2-hydroxy-2-methyl-3-oxobutanoate to 2-acetoin, and are classified as EC 4.1.1.5. In certain embodiments, a malate decarboxylase gene may be derived from a bacterial source. For example, a malate decarboxylase gene may be derived from an L. lactis aldB gene encoding the amino acid sequence set forth in SEQ ID NO: 40, an S. thermophilus aldB gene encoding the amino acid sequence set forth in SEQ ID NO: 41, a B. brevis aldB gene encoding the amino acid sequence set forth in SEQ ID NO: 42, or a E. aerogenes budA gene encoding the amino acid sequence set forth in SEQ ID NO: 43.

[0124] An “alpha-ketoglutarate (AKG) decarboxylase gene” or “KGD gene” as used herein refers to any gene that encodes a polypeptide with alpha-ketoglutarate decarboxylase activity, meaning the ability to catalyze the conversion of alpha-ketoglutarate (2-oxoglutarate) to succinate semialdehyde. Enzymes having AKG decarboxylase activity are classified as EC 4.1.1.71. A KGD gene may be used to derive a gene encoding a polypeptide capable of catalyzing the conversion of OAA to malonate semialdehyde. This activity may be found in a native KGD gene, or it may derived by incorporating one or more mutations into a native KGD gene. In certain embodiments, a KGD gene may be derived from a bacterial source. For example, a KGD gene may be derived from a M. tuberculosis KGD gene encoding the amino acid sequence set forth in SEQ ID NO: 44, a B. japonicum KGD gene encoding the amino acid sequence set forth in SEQ ID NO: 45, or a M. loti (aka Rhizobium loti) KGD gene encoding the amino acid sequence set forth in SEQ ID NO: 46.

[0125] A “branched-chain alpha-keto acid decarboxylase gene” or “BCKA gene” as used herein refers to any gene that encodes a polypeptide with branched-chain alpha-keto acid decarboxylase activity, which can serve to decarboxylate a range of alpha-keto acids from three to six carbons in length. Enzymes having BCKA activity are classified as EC 4.1.1.72. A BCKA gene may be used to derive a gene encoding a polypeptide capable of catalyzing the conversion of OAA to malonate semialdehyde. This activity may be found in a native BCKA gene, or it may be derived by incorporating one or more mutations into a native BCKA gene. In certain embodiments, a BCKA gene may be derived from a bacterial source. For example, a BCKA gene may be derived from a L. lactis kdcA gene encoding the amino acid sequence set forth in SEQ ID NO: 47.

[0126] An “indolepyruvate decarboxylase gene” or “IPDA gene” as used herein refers to any gene that encodes a polypeptide with indolepyruvate decarboxylase activity, meaning the ability to catalyze the conversion of indolepyruvate to indoleacetaldehyde. Enzymes having IPDA activity are classified as EC 4.1.1.74. An IPDA gene may be used to derive a gene encoding a polypeptide capable of catalyzing the conversion of OAA to malonate semialdehyde. This activity may be found in a native IPDA gene, or it may be derived by incorporating one or more mutations into a native IPDA gene. In certain embodiments, an indolepyruvate decarboxylase gene may be derived from a yeast, bacterial, or plant source.

[0127] A “pyruvate decarboxylase gene” or “PDC gene” as used herein refers to any gene that encodes a polypeptide with pyruvate decarboxylase activity, meaning the ability to catalyze the conversion of pyruvate to acetaldehyde. Enzymes having PDC activity are classified as EC 4.1.1.1. In preferred embodiments, a PDC gene that is incorporated into a recombinant cell as provided herein has undergone one or more mutations versus the native gene from which it was derived such that the resultant gene encodes a polypeptide capable of catalyzing the conversion of OAA to malonate semialdehyde. In certain embodiments, a PDC gene may be derived from a yeast source. For example, a PDC gene may be derived from an I. orientalis PDC gene encoding the amino acid sequence set forth in SEQ ID NO: 49, an S. cerevisiae PDC1 gene encoding the amino acid sequence set forth in SEQ ID NO: 50, or a K. lactis PDC encoding the amino acid sequence set forth in SEQ ID NO: 51. In certain embodiments, a PDC gene derived from the I. orientalis PDC gene may comprise the nucleotide sequence set forth in SEQ ID NO: 48 or a nucleotide sequence with at least 50%, at least 60%, at least 70%, at least 80%, at least 85%, at least 90%, at least 95%, at least 97%, or at least 99% sequence identity to the nucleotide sequence set forth in SEQ ID NO: 48. In other embodiments, a PDC gene may be derived from a bacterial source. For example, a PDC gene may be derived from a Z. mobilis PDC gene encoding the amino acid sequence set forth in SEQ ID NO: 52 or an A. pasteurianus PDC gene encoding the amino acid sequence set forth in SEQ ID NO: 53.

[0128] A “benzoylformate decarboxylase” gene as used herein refers to any gene that encodes a polypeptide with benzoylformate decarboxylase activity, meaning the ability to catalyze the conversion of benzoylformate to benzaldehyde. Enzymes having benzoylformate decarboxylase activity are classified as EC 4.1.1.7. In preferred embodiments, a benzoylformate decarboxylase gene that is incorporated into a recombinant cell as provided herein has undergone one or more mutations versus the native gene from which it was derived such that the resultant gene encodes a polypeptide capable of catalyzing the conversion of OAA to malonate semialdehyde. In certain embodiments, a benzoylformate decarboxylase gene may be derived from a bacterial source. For example, a benzoylformate decarboxylase gene may be derived from a P. putida mdlC gene encoding the amino acid sequence set forth in SEQ ID NO: 54, a P. aeruginosa mdlC gene encoding the amino acid sequence set forth in SEQ ID NO: 55, a P. stutzeri dpgB gene encoding the amino acid sequence set forth in SEQ ID NO: 56, or a P. fluorescens ilvB-1 gene encoding the amino acid sequence set forth in SEQ ID NO: 57.

[0129] An “OAA formatelyase gene” as used herein refers to any gene that encodes a polypeptide with OAA formatelyase activity, meaning the ability to catalyze the conversion of an acylate ketoacid to its corresponding CoA derivative. A polypeptide encoded by an OAA formatelyase gene may have activity on pyruvate or on another ketoacid. In certain embodiments, an OAA formatelyase gene encodes a polypeptide that converts OAA to malonyl-CoA.

[0130] A “malonyl-CoA reductase gene” as used herein refers to any gene that encodes a polypeptide with malonyl-CoA reductase activity, meaning the ability to catalyze the conversion of malonyl-CoA to malonate semialdehyde (also referred to as Co-A acylating malonate semialdehyde dehydrogenase activity). In certain embodiments, a malonyl-CoA reductase gene may be derived from a bifunctional malonyl-CoA reductase gene which also has the ability to catalyze the conversion of malonate semialdehyde to 3-HP. In certain of these embodiments, a malonyl-CoA reductase gene may be derived from a bacterial source. For example, a malonyl-CoA reductase gene may be derived from a C. aurantiacus malonyl-CoA reductase gene encoding the amino acid sequence set forth in SEQ ID NO: 58, an R. castenholzii malonyl-CoA reductase gene encoding the amino acid sequence set forth in SEQ ID NO: 59, or an Erythrobacter sp. NAP1 malonyl-CoA reductase gene encoding the amino acid sequence set forth in SEQ ID NO: 60. In other embodiments, a malonyl-CoA reductase gene may be derived from a malonyl-CoA reductase gene encoding a polypeptide that only catalyzes the conversion of malonyl-CoA to malonate semialdehyde. For example, a malonyl-CoA reductase gene may be derived from an M. sedula Msed_0709 gene encoding the amino acid sequence set forth in SEQ ID NO: 61 or a S. tokodaii malonyl-CoA reductase encoding the amino acid sequence set forth in SEQ ID NO: 62.

[0131] A “pyruvate dehydrogenase gene” or “PDH gene” as used herein refers to any gene that encodes a polypeptide with pyruvate dehydrogenase activity, meaning the ability to catalyze the conversion of pyruvate to acetyl-CoA. In certain embodiments, a PDH gene may be derived from a yeast source. For example, a PDH gene may be derived from an S. cerevisiae LAT1, PDA1, PDB1, or LPD gene encoding the amino acid sequence set forth in SEQ ID NOs: 63-66, respectively. In other embodiments, a PDH gene may be derived from a bacterial source. For example, a PDH gene may be derived from an E. coli strain K12 substr. MG1655 aceE, aceF, or Ipd gene encoding the amino acid sequence set forth in SEQ ID NOs: 67-69, respectively, or a B. subtilis pdhA, pdhB, pdhC, or pdhD gene encoding the amino acid sequence set forth in SEQ ID NOs: 70-73, respectively.

[0132] An “acetyl-CoA carboxylase gene” or “ACC gene” as used herein refers to any gene that encodes a polypeptide with acetyl-CoA carboxylase activity, meaning the ability to catalyze the conversion of acetyl-CoA to malonyl-CoA. Enzymes having acetyl-CoA carboxylase activity are classified as EC 6.4.1.2. In certain embodiments, an acetyl-CoA carboxylase gene may be derived from a yeast source. For example, an acetyl-CoA carboxylase gene may be derived from an S. cerevisiae ACC1 gene encoding the amino acid sequence set forth in SEQ ID NO: 74. In other embodiments, an acetyl-CoA carboxylase gene may be derived from a bacterial source. For example, an acetyl-CoA carboxylase gene may be derived from an E. coli accA, accB, accC, or accD gene encoding the amino acid sequence set forth in SEQ ID NOs: 75-78, respectively, or a C. aurantiacus accA, accB, accC, or accD gene encoding the amino acid sequence set forth in SEQ ID NOs: 79-82, respectively.

[0133] An “alanine dehydrogenase gene” as used herein refers to any gene that encodes a polypeptide with alanine dehydrogenase activity, meaning the ability to catalyze the NAD-dependent reductive amination of pyruvate to alanine. Enzymes having alanine dehydrogenase activity are classified as EC 1.4.1.1. In certain embodiments, an alanine dehydrogenase gene may be derived from a bacterial source. For example, an alanine dehydrogenase gene may be derived from a B. subtilis alanine dehydrogenase gene encoding the amino acid sequence set forth in SEQ ID NO: 83.

[0134] A “pyruvate/alanine aminotransferase gene” as used herein refers to any gene that encodes a polypeptide with pyruvate/alanine aminotransferase activity, meaning the ability to catalyze the conversion of pyruvate and L-glutamate to alanine and 2-oxoglutarate. In certain embodiments, a pyruvate/alanine aminotransferase gene is derived from a yeast source. For example, a pyruvate/alanine aminotransferase gene may be derived from an S. pombe pyruvate/alanine aminotransferase gene encoding the amino acid sequence set forth in SEQ ID NO: 84 or an S. cerevisiae ALT2 gene encoding the amino acid sequence set forth in SEQ ID NO: 85.

[0135] An “alanine 2,3 aminomutase gene” or “AAM gene” as used herein refers to a gene that encodes a polypeptide with alanine 2,3 aminomutase activity, meaning the ability to catalyze the conversion of alanine to β-alanine. Alanine 2,3 aminomutase activity is not known to occur naturally. Therefore, an alanine 2,3 aminomutase gene can be derived by incorporating one or more mutations into a native source gene that encodes a polypeptide with similar activity such as lysine 2,3 aminomutase activity (see, e.g., U.S. Pat. No. 7,309,597). In certain embodiments, the native source gene may be a B. subtilis lysine 2,3 aminomutase gene encoding the amino acid sequence set forth in SEQ ID NO: 86, a P. gingivalis lysine 2,3 aminomutase gene encoding the amino acid sequence set forth in SEQ ID NO: 87, or a F. nucleatum (ATCC-10953) lysine 2,3 aminomutase gene encoding the amino acid sequence set forth in SEQ ID NO: 88.

[0136] A “CoA transferase gene” as used herein refers to any gene that encodes a polypeptide with CoA transferase activity, which in one example includes the ability to catalyze the conversion of β-alanine to β-alanyl-CoA and/or the conversion of lactate to lactyl-CoA. In certain embodiments, a CoA transferase gene may be derived from a yeast source. In other embodiments, a CoA transferase gene may be derived from a bacterial source. For example, a CoA transferase gene may be derived from an M. elsdenii CoA transferase gene encoding the amino acid sequence set forth in SEQ ID NO: 89.

[0137] A “CoA synthetase gene” as used herein refers to any gene that encodes a polypeptide with CoA synthetase activity. In one example this includes the ability to catalyze the conversion of β-alanine to β-alanyl-CoA. In another example, this includes the ability to catalyze the conversion of lactate to lactyl-CoA. In certain embodiments, a CoA synthetase gene may be derived from a yeast source. For example, a CoA synthetase gene may be derived from an S. cerevisiae CoA synthetase gene. In other embodiments, a CoA synthetase gene may be derived from a bacterial source. For example, a CoA synthetase gene may be derived from an E. coli CoA synthetase, R. sphaeroides, or S. enterica CoA synthetase gene.

[0138] A “β-alanyl-CoA ammonia lyase gene” as used herein refers to any gene that encodes a polypeptide with β-alanyl-CoA ammonia lyase activity, meaning the ability to catalyze the conversion of β-alanyl-CoA to acrylyl-CoA. In certain embodiments, a β-alanyl-CoA ammonia lyase gene may be derived from a bacterial source, such as a C. propionicum β-alanyl-CoA ammonia lyase gene encoding the amino acid sequence set forth in SEQ ID NO: 90.

[0139] A “3-HP-CoA dehydratase gene” or “acrylyl-CoA hydratase gene” as used herein refers to any gene that encodes a polypeptide with 3-HP-CoA dehydratase gene activity, meaning the ability to catalyze the conversion of acrylyl-CoA to 3-HP-CoA. Enzymes having 3-HP-CoA dehydratase activity are classified as EC 4.2.1.116. In certain embodiments, a 3-HP-CoA dehydratase gene may be derived from a yeast or fungal source, such as a P. sojae 3-HP-CoA dehydratase gene encoding the amino acid sequence set forth in SEQ ID NO: 91. In other embodiments, a 3-HP-CoA dehydratase gene may be derived from a bacterial source. For example, a 3-HP-CoA dehydratase gene may be derived from a C. aurantiacus 3-HP-CoA dehydratase gene encoding the amino acid sequence set forth in SEQ ID NO: 92, an R. rubrum 3-HP-CoA dehydratase gene encoding the amino acid sequence set forth in SEQ ID NO: 93, or an R. capsulates 3-HP-CoA dehydratase gene encoding the amino acid sequence set forth in SEQ ID NO: 94. In still other embodiments, a 3-HP-CoA dehydratase gene may be derived from a mammalian source. For example, a 3-HP-CoA dehydratase gene may be derived from a H. sapiens 3-HP-CoA dehydratase gene encoding the amino acid sequence set forth in SEQ ID NO: 95.

[0140] A “3-HP-CoA hydrolase gene” as used herein refers to any gene that encodes a polypeptide with 3-HP-CoA hydrolase activity, meaning the ability to catalyze the conversion of 3-HP-CoA to 3-HP. In certain embodiments, a 3-HP-CoA gene may be derived from a yeast or fungal source. In other embodiments, a 3-HP-CoA gene may be derived from a bacterial or mammalian source.

[0141] A “3-hydroxyisobutyryl-CoA hydrolase gene” as used herein refers to any gene that encodes a polypeptide with 3-hydroxyisobutyryl-CoA hydrolase activity, which in one example includes the ability to catalyze the conversion of 3-HP-CoA to 3-HP. In certain embodiments, a 3-hydroxyisobutyryl-CoA hydrolase gene may be derived from a bacterial source, such as a P. fluorescens 3-hydroxyisobutyryl-CoA hydrolase gene encoding the amino acid sequence set forth in SEQ ID NO: 96 or a B. cereus 3-hydroxyisobutyryl-CoA hydrolase gene encoding the amino acid sequence set forth in SEQ ID NO: 97. In other embodiments, a 3-hydroxyisobutyryl-CoA hydrolase gene may be derived from a mammalian source, such as a H. sapiens 3-hydroxyisobutyryl-CoA hydrolase gene encoding the amino acid sequence set forth in SEQ ID NO: 98.

[0142] A “lactate dehydrogenase gene” or “LDH gene” as used herein refers to any gene that encodes a polypeptide with lactate dehydrogenase activity, meaning the ability to catalyze the conversion of pyruvate to lactate. In certain embodiments, an LDH gene may be derived from a fungal, bacterial, or mammalian source.

[0143] A “lactyl-CoA dehydratase gene” as used herein refers to any gene that encodes a polypeptide with lactyl-CoA dehydratase activity, meaning the ability to catalyze the conversion of lactyl-CoA to acrylyl-CoA. In certain embodiments, a lactyl-CoA dehydratase gene may be derived from a bacterial source. For example, a lactyl-CoA dehydratase gene may be derived from an M. elsdenii lactyl-CoA dehydratase E1, EIIa, or EIIb subunit gene encoding the amino acid sequence set forth in SEQ ID NOs: 99-101.

[0144] An “aldehyde dehydrogenase gene” as used herein refers to any gene that encodes a polypeptide with aldehyde dehydrogenase activity, which in one example includes the ability to catalyze the conversion of 3-HPA to 3-HP and vice versa. In certain embodiments, an aldehyde dehydrogenase gene may be derived from a yeast source, such as an S. cerevisiae aldehyde dehydrogenase gene encoding the amino acid sequence set forth in SEQ ID NO: 102 or an I. orientalis aldehyde dehydrogenase gene encoding the amino acid sequence set forth in SEQ ID NOs: 122, 124, or 126. In other embodiments, an aldehyde dehydrogenase may be derived from a bacterial source, such as an E. coli aldH gene encoding the amino acid sequence set forth in SEQ ID NO: 103 or a K. pneumoniae aldehyde dehydrogenase gene encoding the amino acid sequence set forth in SEQ ID NO: 104.

[0145] A “glycerol dehydratase gene” as used herein refers to any gene that encodes a polypeptide with glycerol dehydratase activity, meaning the ability to catalyze the conversion of glycerol to 3-HPA. In certain embodiments, a glycerol dehydratase gene may be derived from a bacterial source, such as a K. pneumonia or C. freundii glycerol dehydratase gene.

[0146] The enzymes of the selected active 3-HP pathway, and activities thereof, can be detected using methods known in the art or as described herein. These detection methods may include use of specific antibodies, formation of an enzyme product, or disappearance of an enzyme substrate. See, for example, Sambrook et al., Molecular Cloning: A Laboratory Manual, Third Ed., Cold Spring Harbor Laboratory, New York (2001); Ausubel et al., Current Protocols in Molecular Biology, John Wiley and Sons, Baltimore, Md. (1999); and Hanai et al., Appl. Environ. Microbiol. 73:7814-7818 (2007)).

### Hosts, Expression Vectors and Nucleic Acid Constructs

[0147] The recombinant cells described herein may be selected from any host cell capable of having an active 3-HP pathway. Those skilled in the art will understand that the genetic alterations, including metabolic modifications exemplified herein, may be described with reference to a suitable host organism and their corresponding metabolic reactions or a suitable source organism for desired genetic material such as genes for a desired metabolic pathway. However, given the complete genome sequencing of a wide variety of organisms and the high level of skill in the area of genomics, those skilled in the art can apply the teachings and guidance provided herein to other organisms. For example, the metabolic alterations exemplified herein can readily be applied to other species by incorporating the same or analogous encoding nucleic acid from species other than the referenced species.

[0148] The recombinant host cell may be any Gram-positive or Gram-negative bacterium. Gram-positive bacteria include, but are not limited to, Bacillus, Clostridium, Enterococcus, Geobacillus, Lactobacillus, Lactococcus, Oceanobacillus, Staphylococcus, Streptococcus, and Streptomyces. Gram-negative bacteria include, but are not limited to, Campylobacter, E. coli, Flavobacterium, Fusobacterium, Helicobacter, Ilyobacter, Neisseria, Pseudomonas, Salmonella, and Ureaplasma.

[0149] The bacterial host cell may be any Bacillus cell including, but not limited to, Bacillus alkalophilus, Bacillus amyloliquefaciens, Bacillus brevis, Bacillus circulans, Bacillus clausii, Bacillus coagulans, Bacillus firmus, Bacillus lautus, Bacillus lentus, Bacillus licheniformis, Bacillus megaterium, Bacillus pumilus, Bacillus stearothermophilus, Bacillus subtilis, and Bacillus thuringiensis cells.

[0150] The bacterial host cell may also be any Streptococcus cell including, but not limited to, Streptococcus equisimilis, Streptococcus pyogenes, Streptococcus uberis, and Streptococcus equi subsp. Zooepidemicus cells.

[0151] The bacterial host cell may also be any Streptomyces cell, including, but not limited to, Streptomyces achromogenes, Streptomyces avermitilis, Streptomyces coelicolor, Streptomyces griseus, and Streptomyces lividans cells.

[0152] The introduction of DNA into a Bacillus cell may be effected by protoplast transformation (see, e.g., Chang and Cohen, 1979, Mol. Gen. Genet. 168: 111-115), competent cell transformation (see, e.g., Young and Spizizen, 1961, J. Bacteriol. 81: 823-829, or Dubnau and Davidoff-Abelson, 1971, J. Mol. Biol. 56: 209-221), electroporation (see, e.g., Shigekawa and Dower, 1988, Biotechniques 6: 742-751), or conjugation (see, e.g., Koehler and Thorne, 1987, J. Bacteriol. 169: 5271-5278). The introduction of DNA into an E. coli cell may be effected by protoplast transformation (see, e.g., Hanahan, 1983, J. Mol. Biol. 166: 557-580) or electroporation (see, e.g., Dower et al., 1988, Nucleic Acids Res. 16: 6127-6145). The introduction of DNA into a Streptomyces cell may be effected by protoplast transformation, electroporation (see, e.g., Gong et al., 2004, Folia Microbiol. (Praha) 49: 399-405), conjugation (see, e.g., Mazodier et al., 1989, J. Bacteriol. 171: 3583-3585), or transduction (see, e.g., Burke et al., 2001, Proc. Natl. Acad. Sci. USA 98: 6289-6294). The introduction of DNA into a Pseudomonas cell may be effected by electroporation (see, e.g., Choi et al., 2006, J. Microbiol. Methods 64: 391-397), or conjugation (see, e.g., Pinedo and Smets, 2005, Appl. Environ. Microbiol. 71: 51-57). The introduction of DNA into a Streptococcus cell may be effected by natural competence (see, e.g., Perry and Kuramitsu, 1981, Infect. Immun. 32: 1295-1297), protoplast transformation (see, e.g., Catt and Jollick, 1991, Microbios 68: 189-207), electroporation (see, e.g., Buckley et al., 1999, Appl. Environ. Microbiol. 65: 3800-3804) or conjugation (see, e.g., Clewell, 1981, Microbiol. Rev. 45: 409-436). However, any method known in the art for introducing DNA into a host cell can be used.

[0153] The recombinant host cell may also be a eukaryote, such as a mammalian, insect, plant, or fungal cell.

[0154] “Fungi” as used herein includes the phyla Ascomycota, Basidiomycota, Chytridiomycota, and Zygomycota as well as the Oomycota and all mitosporic fungi (as defined by Hawksworth et al., In, Ainsworth and Bisby's Dictionary of The Fungi, 8th edition, 1995, CAB International, University Press, Cambridge, UK).

[0155] In one embodiment, the host cell is a yeast cell. “Yeast” as used herein includes ascosporogenous yeast (Endomycetales), basidiosporogenous yeast, and yeast belonging to the Fungi Imperfecti (Blastomycetes). Since the classification of yeast may change in the future, for the purposes described herein, yeast shall be defined as described in Biology and Activities of Yeast (Skinner, F. A., Passmore, S. M., and Davenport, R. R., eds, Soc. App. Bacteriol. Symposium Series No. 9, 1980).

[0156] The yeast host cell may be a Candida, Hansenula, Issatchenkia, Kluyveromyces, Pichia, Saccharomyces, Schizosaccharomyces, or Yarrowia cell, such as a Candida sonorensis, Candida methanosorbosa, Candida ethanolica, Issatchenkia orientalis, Kluyveromyces lactis, Kluyveromyces marxianus, Pichia fermentans, Pichia galeiformis, Pichia membranifaciens, Pichia deserticola, Saccharomyces carlsbergensis, Saccharomyces cerevisiae, Saccharomyces diastaticus, Saccharomyces bulderi, Saccharomyces douglasii, Saccharomyces kluyveri, Saccharomyces norbensis, Saccharomyces oviformis, or Yarrowia lipolytica cell.

[0157] In certain embodiments, the modified yeast cells provided herein are generated by incorporating one or more genetic modifications into a Crabtree-negative host yeast cell. In certain of these embodiments the host yeast cell belongs to the genus Issatchenkia, Candida, or Saccharomyces, and in certain of these embodiments the host cell belongs to the I. orientalis/P. fermentans or Saccharomyces clade. In certain of embodiments, the host cell is I. orientalis or C. lambica, or S. bulderi. In certain embodiments, the yeast cells are I. orientalis CNB1 yeast cells (as described in WO2012/074818, the content of which is incorporated herein by reference). CNB1 cells include CNB1 cells described in WO2012/074818 and any cell derived from the CNB1 cells described therein.

[0158] The yeast host cell may be derived from a cell or engineered such that the cell has been genetically modified to produce high lactic acid titers, exhibit increased tolerance to acidic pH, exhibit increased tolerance to ethanol or propanol, and/or display increased ability to ferment pentose sugars (yet, in some embodiments, the yeast cell is unable to ferment pentose sugars). Exemplary genetically modified yeast cells are described in WO00/71738, WO03/049525, WO03/102201, WO03/102152, WO02/42471, WO2007/032792, WO2007/106524, WO2007/117282, the content of which is hereby incorporated by reference with respect to said cells. The modification of any yeast cell described in the foregoing applications is contemplated with an active 3-HP pathway as described herein.

[0159] The yeast host cell may be a crabtree-positive phenotype or a crabtree-negative phenotype. Crabtree-negative organisms are characterized by the ability to be induced into an increased fermentative state. Both naturally occurring organisms and recombinant organisms can be characterized as Crabtree-negative. The Crabtree effect is defined as oxygen consumption inhibition in a microorganism when the microorganism is cultured under aerobic conditions in the presence of a high concentration of glucose (e.g. >5 mM glucose). Crabtree-positive organisms continue to ferment (rather than respire) irrespective of oxygen availability in the presence of glucose, while Crabtree-negative organisms do not exhibit glucose-mediated inhibition of oxygen consumption. This characteristic is useful for organic product synthesis, since it permits cells to be grown at high substrate concentrations but to retain the beneficial energetic effects of oxidative phosphorylation. In one aspect, the yeast has a crabtree-negative phenotype.

[0160] In certain embodiments, the yeast cells provided herein are “3-HP resistant yeast cells,” as described in US2012/0135481. In certain of these embodiments, the yeast cells may exhibit 3-HP resistance in their native form. In other embodiments, the cells may have undergone mutation and/or selection (e.g., chemostat selection or repeated serial subculturing) before, during, or after introduction of genetic modifications related to an active 3-HP pathway, such that the mutated and/or selected cells possess a higher degree of resistant to 3-HP than wild-type cells of the same species. For example, in some embodiments, the cells have undergone mutation and/or selection in the presence of 3-HP or lactic acid before or after being genetically modified with one or more heterologous 3-HP pathway genes. In certain embodiments, mutation and/or selection may be carried out on cells that exhibit 3-HP resistance in their native form. Cells that have undergone mutation and/or selection may be tested for sugar consumption and other characteristics in the presence of varying levels of 3-HP in order to determine their potential as industrial hosts for 3-HP production. In addition to 3-HP resistance, the yeast cells provided herein may have undergone mutation and/or selection for resistance to one or more additional organic acids (e.g., lactic acid) or to other fermentation products, byproducts, or media components. Selection, such as selection for resistance to 3-HP or to other compounds, may be accomplished using methods well known in the art (e.g., as described in US2012/0135481).

[0161] In one embodiment, the host cell is a filamentous fungal cell. “Filamentous fungi” include all filamentous forms of the subdivision Eumycota and Oomycota (as defined by Hawksworth et al., 1995, supra). The filamentous fungi are generally characterized by a mycelial wall composed of chitin, cellulose, glucan, chitosan, mannan, and other complex polysaccharides. Vegetative growth is by hyphal elongation and carbon catabolism is obligately aerobic. In contrast, vegetative growth by yeasts such as Saccharomyces cerevisiae is by budding of a unicellular thallus and carbon catabolism may be fermentative.

[0162] The filamentous fungal host cell may be an Acremonium, Aspergillus, Aureobasidium, Bjerkandera, Ceriporiopsis, Chrysosporium, Coprinus, Coriolus, Cryptococcus, Filibasidium, Fusarium, Humicola, Magnaporthe, Mucor, Myceliophthora, Neocallimastix, Neurospora, Paecilomyces, Penicillium, Phanerochaete, Phlebia, Piromyces, Pleurotus, Schizophyllum, Talaromyces, Thermoascus, Thielavia, Tolypocladium, Trametes, or Trichoderma cell.

[0163] For example, the filamentous fungal host cell may be an Aspergillus awamori, Aspergillus foetidus, Aspergillus fumigatus, Aspergillus japonicus, Aspergillus nidulans, Aspergillus niger, Aspergillus oryzae, Bjerkandera adusta, Ceriporiopsis aneirina, Ceriporiopsis caregiea, Ceriporiopsis gilvescens, Ceriporiopsis pannocinta, Ceriporiopsis rivulosa, Ceriporiopsis subrufa, Ceriporiopsis subvermispora, Chrysosporium inops, Chrysosporium keratinophilum, Chrysosporium lucknowense, Chrysosporium merdarium, Chrysosporium pannicola, Chrysosporium queenslandicum, Chrysosporium tropicum, Chrysosporium zonatum, Coprinus cinereus, Coriolus hirsutus, Fusarium bactridioides, Fusarium cerealis, Fusarium crookwellense, Fusarium culmorum, Fusarium graminearum, Fusarium graminum, Fusarium heterosporum, Fusarium negundi, Fusarium oxysporum, Fusarium reticulatum, Fusarium roseum, Fusarium sambucinum, Fusarium sarcochroum, Fusarium sporotrichioides, Fusarium sulphureum, Fusarium torulosum, Fusarium trichothecioides, Fusarium venenatum, Humicola insolens, Humicola lanuginosa, Mucor miehei, Myceliophthora thermophila, Neurospora crassa, Penicillium purpurogenum, Phanerochaete chrysosporium, Phlebia radiata, Pleurotus eryngii, Thielavia terrestris, Trametes villosa, Trametes versicolor, Trichoderma harzianum, Trichoderma koningii, Trichoderma longibrachiatum, Trichoderma reesei, or Trichoderma viride cell.

[0164] Fungal cells may be transformed by a process involving protoplast formation, transformation of the protoplasts, and regeneration of the cell wall in a manner known per se. Suitable procedures for transformation of Aspergillus and Trichoderma host cells are described in EP 238023, Yelton et al., 1984, Proc. Natl. Acad. Sci. USA 81: 1470-1474, and Christensen et al., 1988, Bio/Technology 6: 1419-1422. Suitable methods for transforming Fusarium species are described by Malardier et al., 1989, Gene 78: 147-156, and WO 96/00787. Yeast may be transformed using the procedures described by Becker and Guarente, In Abelson, J. N. and Simon, M. I., editors, Guide to Yeast Genetics and Molecular Biology, Methods in Enzymology, Volume 194, pp 182-187, Academic Press, Inc., New York; Ito et al., 1983, J. Bacteriol. 153: 163; and Hinnen et al., 1978, Proc. Natl. Acad. Sci. USA 75: 1920, or as described herein.

[0165] The ideal cell for 3-HP production is capable of growing at low pH levels. The ability to conduct fermentation at a low pH decreases downstream recovery costs, resulting in more economical production. Therefore, in certain embodiments the host cell is capable of growing at low pH levels (e.g., at pH levels less than 7, 6, 5, 4, or 3).

[0166] A suitable host cell may possess one or more favorable characteristics in addition to 3-HP resistance and/or low pH growth capability. For example, potential host cells exhibiting 3-HP resistance may be further selected based on glycolytic rates, specific growth rates, thermotolerance, tolerance to biomass hydrolysate inhibitors, overall process robustness, and so on. These criteria may be evaluated prior to any genetic modification relating to a 3-HP pathway, or they may be evaluated after one or more such modifications have taken place.

[0167] In some aspects, the recombinant cell comprises one or more (e.g., two, several) heterologous polynucleotides of an active 3-HP pathway described herein (e.g., a heterologous polynucleotide encoding a PPC; a heterologous polynucleotide encoding a PYC; a heterologous polynucleotide encoding an AAT; a heterologous polynucleotide encoding an ADC; a heterologous polynucleotide encoding a BAAT or gabT; and/or a heterologous polynucleotide encoding a 3-HPDH), wherein the recombinant cell secretes (and/or is capable of secreting) an increased level of 3-HP compared to the host cell without the one or more heterologous polynucleotides of the active 3-HP pathway when cultivated under the same conditions. In some aspects, the recombinant cell secretes and/or is capable of secreting an increased level of 3-HP of at least 5%, e.g., at least 10%, at least 15%, at least 20%, at least 25%, at least 50%, at least 100%, at least 150%, at least 200%, at least 300%, or at 500% compared to the host cell without the one or more heterologous polynucleotides of the active 3-HP pathway, when cultivated under the same conditions. Examples of suitable cultivation conditions are described below and will be readily apparent to one of skill in the art based on the teachings herein.

[0168] In any of these aspects, the recombinant cell produces (and/or is capable of producing) 3-HP at a yield of at least 10%, e.g., at least 20%, at least 30%, at least 40%, at least 50%, at least 60%, at least 70%, at least 80%, or at least 90%, of theoretical.

[0169] In any of these aspects, the recombinant cell has a 3-HP volumetric productivity greater than about 0.1 g/L per hour, e.g., greater than about 0.2 g/L per hour, 0.5 g/L per hour, 0.6 g/L per hour, 0.7 g/L per hour, 0.8 g/L per hour, 0.9 g/L per hour, 1.0 g/L per hour, 1.1 g/L per hour, 1.2 g/L per hour, 1.3 g/L per hour, 1.5 g/L per hour, 1.75 g/L per hour, 2.0 g/L per hour, 2.25 g/L per hour, 2.5 g/L per hour, 2.75 g/L per hour, 3.0 g/L per hour, 3.25 g/L per hour, 3.5 g/L per hour, 3.75 g/L per hour, or 4.0 g/L per hour; or between about 0.1 g/L per hour and about 2.0 g/L per hour, e.g., between about 0.3 g/L per hour and about 1.7 g/L per hour, about 0.5 g/L per hour and about 1.5 g/L per hour, about 0.7 g/L per hour and about 1.3 g/L per hour, about 0.8 g/L per hour and about 1.2 g/L per hour, or about 0.9 g/L per hour and about 1.1 g/L per hour; or between about 0.1 g/L per hour and about 4.0 g/L per hour, e.g., between about 0.5 g/L per hour and about 3.75 g/L per hour, about 1.0 g/L per hour and about 3.5 g/L per hour, about 2.0 g/L per hour and about 3.25 g/L per hour.

[0170] In any of these aspects, the recombinant cell produces (and/or is capable of producing) a greater amount of 3-HP compared to the cell without the heterologous polynucleotide encoding the 3-HPDH when cultivated under the same conditions. In some embodiments, the cell produces (and/or is capable of producing) at least 10% more (e.g., at least 15%, at least 20%, at least 25%, at least 30%, at least 35%, at least 40%, at least 45%, at least 50%, at least 75%, at least 100%, at least 200%, at least 300%, or at 500% more) 3-HP compared to the cell without the heterologous polynucleotide encoding the 3-HPDH when cultivated under the same conditions.

[0171] In any of these aspects, the recombinant cell produces (and/or is capable of producing) a greater amount of 3-HP (e.g., at least 10% more, at least 15%, at least 20%, at least 25%, at least 30%, at least 35%, at least 40%, at least 45%, at least 50%, at least 75%, at least 100%, at least 200%, at least 300%, or at 500% more) compared to a second recombinant cell, when cultivated under identical conditions; wherein the second cell is identical to the recombinant cell with the proviso that the second cell encodes the 3-HPDH of SEQ ID NO: 26 in place of the recombinant cell 3-HPDH. In another embodiment, the recombinant cell produces (and/or is capable of producing) a greater amount of 3-HP (e.g., at least 10% more, at least 15%, at least 20%, at least 25%, at least 30%, at least 35%, at least 40%, at least 45%, at least 50%, at least 75%, at least 100%, at least 200%, at least 300%, or at 500% more) compared to a second recombinant cell, when cultivated under identical conditions; wherein the second cell is identical to the recombinant cell with the proviso that the second cell encodes the full-length 3-HPDH of SEQ ID NO: 197 in place of the recombinant cell 3-HPDH.

[0172] In some embodiments, the recombinant cells have an increased level of 3-HPDH activity compared to the host cells without the heterologous polynucleotide encoding the 3-HPDH, when cultivated under the same conditions. In other aspects, the cells have an increased level of 3-HPDH activity of at least 5%, e.g., at least 10%, at least 15%, at least 20%, at least 25%, at least 50%, at least 100%, at least 150%, at least 200%, at least 300%, or at 500% compared to the host cells without the heterologous polynucleotide encoding 3-HPDH, when cultivated under the same conditions.

[0173] The recombinant cells may be cultivated in a nutrient medium suitable for production of one or more polypeptides of the active 3-HP pathway using methods well known in the art. For example, the cell may be cultivated by shake flask cultivation, and small-scale or large-scale fermentation (including continuous, batch, fed-batch, or solid state fermentations) in laboratory or industrial fermentors performed in a suitable medium and under conditions allowing the desired polypeptide to be expressed and/or isolated. The cultivation takes place in a suitable nutrient medium comprising carbon and nitrogen sources and inorganic salts, as described herein, using procedures known in the art. Suitable media are available from commercial suppliers, may be prepared according to published compositions (e.g., in catalogues of the American Type Culture Collection), or may be prepared from commercially available ingredients.

[0174] The recombinant cells described herein also can be subjected to adaptive evolution to further augment 3-HP biosynthesis, including under conditions approaching theoretical maximum growth.

[0175] The recombinant cells described herein can further contain lipase or esterase activity, for example due to expression of a heterologous polynucleotide encoding a lipase or esterase (EC 3.1.1.-). Such cells can be used to produce an ester of 3-HP, such as methyl 3-hydroxypropionate, ethyl 3-hydroxypropionate, propyl 3-hydroxypropionate, butyl 3-hydroxypropionate, or 2-ethylhexyl 3-hydroxypropionate. The cells can further contain esterase activity, for example due to expression of a heterologous polynucleotide encoding an esterase. Such cells can be used to produce polymerized 3-HP. The cells can further contain alcohol dehydrogenase activity (EC 1.1.1.1), aldehyde dehydrogenase activity (EC 1.2.1.-), or both, for example due to expression of a heterologous polynucleotide encoding an alcohol dehydrogenase, aldehyde dehydrogenase, or both. Such cells can be used to produce 1,3-propanediol.

[0176] The recombinant cells described herein may utilize expression vectors comprising the coding sequence of one or more (e.g., two, several) heterologous 3-HP pathway genes linked to one or more control sequences that direct expression in a suitable cell under conditions compatible with the control sequence(s). Such expression vectors may be used in any of the cells and methods described herein. The polynucleotides described herein may be manipulated in a variety of ways to provide for expression of a desired polypeptide. Manipulation of the polynucleotide prior to its insertion into a vector may be desirable or necessary depending on the expression vector. The techniques for modifying polynucleotides utilizing recombinant DNA methods are well known in the art.

[0177] A construct or vector (or multiple constructs or vectors) comprising the one or more (e.g., two, several) heterologous 3-HP pathway genes may be introduced into a cell so that the construct or vector is maintained as a chromosomal integrant or as a self-replicating extra-chromosomal vector as described earlier.

[0178] The various nucleotide and control sequences may be joined together to produce a recombinant expression vector that may include one or more (e.g., two, several) convenient restriction sites to allow for insertion or substitution of the polynucleotide at such sites. Alternatively, the polynucleotide(s) may be expressed by inserting the polynucleotide(s) or a nucleic acid construct comprising the sequence into an appropriate vector for expression. In creating the expression vector, the coding sequence is located in the vector so that the coding sequence is operably linked with the appropriate control sequences for expression.

[0179] The recombinant expression vector may be any vector (e.g., a plasmid or virus) that can be conveniently subjected to recombinant DNA procedures and can bring about expression of the polynucleotide. The choice of the vector will typically depend on the compatibility of the vector with the host cell into which the vector is to be introduced. The vector may be a linear or closed circular plasmid.

[0180] In one aspect, the recombinant cell comprises a heterologous polynucleotide is contained in an independent vector. In one aspect, the recombinant cell comprises a plurality of heterologous polynucleotides each contained in an independent vector. In one aspect, the recombinant cell comprises at least two heterologous polynucleotides contained in a single vector. In one aspect, the recombinant cell comprises at least three of the heterologous polynucleotides contained on a single vector. In one aspect, the recombinant cell comprises at least four of the heterologous polynucleotides contained on a single vector. In one aspect, all the heterologous polynucleotides of the recombinant cell are contained on a single vector. Polynucleotides encoding heteromeric subunits of a protein complex may be contained in a single heterologous polynucleotide on a single vector or alternatively contained in separate heterologous polynucleotides on separate vectors.

[0181] The vector may be an autonomously replicating vector, i.e., a vector that exists as an extrachromosomal entity, the replication of which is independent of chromosomal replication, e.g., a plasmid, an extrachromosomal element, a minichromosome, or an artificial chromosome. The vector may contain any means for assuring self-replication. Alternatively, the vector may be one that, when introduced into the host cell, is integrated into the genome and replicated together with the chromosome(s) into which it has been integrated. Furthermore, a single vector or plasmid or two or more vectors or plasmids that together contain the total DNA to be introduced into the genome of the cell, or a transposon, may be used.

[0182] The expression vector may contain any suitable promoter sequence that is recognized by a cell for expression of a 3-HPDH gene or any 3-HP pathway gene described herein. The promoter sequence contains transcriptional control sequences that mediate the expression of the polypeptide. The promoter may be any polynucleotide that shows transcriptional activity in the cell of choice including mutant, truncated, and hybrid promoters, and may be obtained from genes encoding extracellular or intracellular polypeptides either homologous or heterologous to the cell.

[0183] Each heterologous polynucleotide described herein may be operably linked to a promoter that is foreign to the polynucleotide. For example, in one aspect, the heterologous polynucleotide encoding the 3-HPDH is operably linked to a promoter foreign to the polynucleotide. In another aspect, the heterologous polynucleotide encoding a polypeptide of a 3-HP pathway described herein (e.g., a PPC, PYC, AAT, ADC, BAAT, gabT, or 3-HPDH) is operably linked to promoter foreign to the polynucleotide. The promoters may be identical to or share a high degree of sequence identity (e.g., at least about 80%, at least about 85%, at least about 90%, at least about 95%, or at least about 99%) with a selected native promoter.

[0184] Examples of suitable promoters for directing transcription of the nucleic acid constructs of the present invention in a bacterial host cell are the promoters obtained from the Bacillus amyloliquefaciens alpha-amylase gene (amyQ), Bacillus licheniformis alpha-amylase gene (amyL), Bacillus licheniformis penicillinase gene (penP), Bacillus stearothermophilus maltogenic amylase gene (amyM), Bacillus subtilis levansucrase gene (sacB), Bacillus subtilis xyIA and xyIB genes, Bacillus thuringiensis cryIIIA gene (Agaisse and Lereclus, 1994, Molecular Microbiology 13: 97-107), E. coli lac operon, E. coli trc promoter (Egon et al., 1988, Gene 69: 301-315), Streptomyces coelicolor agarase gene (dagA), and prokaryotic beta-lactamase gene (Villa-Kamaroff et al., 1978, Proc. Natl. Acad. Sci. USA 75: 3727-3731), as well as the tac promoter (DeBoer et al., 1983, Proc. Natl. Acad. Sci. USA 80: 21-25). Further promoters are described in “Useful proteins from recombinant bacteria” in Gilbert et al., 1980, Scientific American 242: 74-94; and in Sambrook et al., 1989, supra. Examples of tandem promoters are disclosed in WO 99/43835.

[0185] Examples of suitable promoters for directing the transcription of the nucleic acid constructs in a yeast cells, include, but are not limited to, the promoters obtained from the genes for enolase, (e.g., S. cerevisiae enolase or I. orientalis enolase (ENO1)), galactokinase (e.g., S. cerevisiae galactokinase or I. orientalis galactokinase (GAL1)), alcohol dehydrogenase/glyceraldehyde-3-phosphate dehydrogenase (e.g., S. cerevisiae alcohol dehydrogenase/glyceraldehyde-3-phosphate dehydrogenase or I. orientalis alcohol dehydrogenase/glyceraldehyde-3-phosphate dehydrogenase (ADH1, ADH2/GAP)), triose phosphate isomerase (e.g., S. cerevisiae triose phosphate isomerase or I. orientalis triose phosphate isomerase (TPI)), metallothionein (e.g., S. cerevisiae metallothionein or I. orientalis metallothionein (CUP1)), 3-phosphoglycerate kinase (e.g., S. cerevisiae 3-phosphoglycerate kinase or I. orientalis 3-phosphoglycerate kinase (PGK)), PDC1, xylose reductase (XR), xylitol dehydrogenase (XDH), L-(+)-lactate-cytochrome c oxidoreductase (CYB2), translation elongation factor-1 (TEF1), translation elongation factor-2 (TEF2), glyceraldehyde-3-phosphate dehydrogenase (GAPDH), and orotidine 5′-phosphate decarboxylase (URA3) genes. Other useful promoters for yeast host cells are described by Romanos et al., 1992, Yeast 8: 423-488.

[0186] Examples of suitable promoters for directing transcription of the nucleic acid constructs of the present invention in a filamentous fungal host cell are promoters obtained from the genes for Aspergillus nidulans acetamidase, Aspergillus niger neutral alpha-amylase, Aspergillus niger acid stable alpha-amylase, Aspergillus niger or Aspergillus awamori glucoamylase (glaA), Aspergillus oryzae TAKA amylase, Aspergillus oryzae alkaline protease, Aspergillus oryzae triose phosphate isomerase, Fusarium oxysporum trypsin-like protease (WO 96/00787), Fusarium venenatum amyloglucosidase (WO 00/56900), Fusarium venenatum Dania (WO 00/56900), Fusarium venenatum Quinn (WO 00/56900), Rhizomucor miehei lipase, Rhizomucor miehei aspartic proteinase, Trichoderma reesei beta-glucosidase, Trichoderma reesei cellobiohydrolase I, Trichoderma reesei cellobiohydrolase II, Trichoderma reesei endoglucanase I, Trichoderma reesei endoglucanase II, Trichoderma reesei endoglucanase III, Trichoderma reesei endoglucanase IV, Trichoderma reesei endoglucanase V, Trichoderma reesei xylanase I, Trichoderma reesei xylanase II, Trichoderma reesei beta-xylosidase, as well as the NA2-tpi promoter (a modified promoter from an Aspergillus neutral alpha-amylase gene in which the untranslated leader has been replaced by an untranslated leader from an Aspergillus triose phosphate isomerase gene; non-limiting examples include modified promoters from an Aspergillus niger neutral alpha-amylase gene in which the untranslated leader has been replaced by an untranslated leader from an Aspergillus nidulans or Aspergillus oryzae triose phosphate isomerase gene); and mutant, truncated, and hybrid promoters thereof.

[0187] The control sequence may also be a suitable transcription terminator sequence, which is recognized by a host cell to terminate transcription. The terminator sequence is operably linked to the 3′-terminus of the polynucleotide encoding the polypeptide. Any terminator that is functional in the yeast cell of choice may be used. The terminator may be identical to or share a high degree of sequence identity (e.g., at least about 80%, at least about 85%, at least about 90%, at least about 95%, or at least about 99%) with the selected native terminator. In certain embodiments, 3-HP pathway genes are linked to a terminator that comprises a functional portion of a native GAL10 gene native to the host cell or a sequence that shares at least 80%, at least 85%, at least 90%, or at least 95% sequence identity with a native GAL10 terminator.

[0188] Suitable terminators for bacterial host cells may be obtained from the genes for Bacillus clausii alkaline protease (aprH), Bacillus licheniformis alpha-amylase (amyL), and Escherichia coli ribosomal RNA (rrnB).

[0189] Suitable terminators for yeast host cells may be obtained from the genes for enolase (e.g., S. cerevisiae or I. orientalis enolase cytochrome C (e.g., S. cerevisiae or I. orientalis cytochrome (CYC1)), glyceraldehyde-3-phosphate dehydrogenase (e.g., S. cerevisiae or I. orientalis glyceraldehyde-3-phosphate dehydrogenase (gpd)), PDC1, XR, XDH, transaldolase (TAL), transketolase (TKL), ribose 5-phosphate ketol-isomerase (RKI), CYB2, and the galactose family of genes (especially the GAL10 terminator). Other useful terminators for yeast host cells are described by Romanos et al., 1992, supra.

[0190] Suitable terminators for filamentous fungal host cells may be obtained from the genes for Aspergillus nidulans anthranilate synthase, Aspergillus niger glucoamylase, Aspergillus niger alpha-glucosidase, Aspergillus oryzae TAKA amylase, and Fusarium oxysporum trypsin-like protease.

[0191] The control sequence may also be an mRNA stabilizer region downstream of a promoter and upstream of the coding sequence of a gene which increases expression of the gene.

[0192] Examples of suitable mRNA stabilizer regions are obtained from a Bacillus thuringiensis cryIIIA gene (WO 94/25612) and a Bacillus subtilis SP82 gene (Hue et al., 1995, Journal of Bacteriology 177: 3465-3471).

[0193] The control sequence may also be a suitable leader sequence, when transcribed is a nontranslated region of an mRNA that is important for translation by the host cell. The leader sequence is operably linked to the 5′-terminus of the polynucleotide encoding the polypeptide. Any leader sequence that is functional in the yeast cell of choice may be used.

[0194] Suitable leaders for yeast host cells are obtained from the genes for enolase (e.g., S. cerevisiae or I. orientalis enolase (ENO-1)), 3-phosphoglycerate kinase (e.g., S. cerevisiae or I. orientalis 3-phosphoglycerate kinase), alpha-factor (e.g., S. cerevisiae or I. orientalis alpha-factor), and alcohol dehydrogenase/glyceraldehyde-3-phosphate dehydrogenase (e.g., S. cerevisiae or I. orientalis alcohol dehydrogenase/glyceraldehyde-3-phosphate dehydrogenase (ADH2/GAP)).

[0195] Preferred leaders for filamentous fungal host cells are obtained from the genes for Aspergillus oryzae TAKA amylase and Aspergillus nidulans triose phosphate isomerase.

[0196] The control sequence may also be a polyadenylation sequence; a sequence operably linked to the 3′-terminus of the polynucleotide and, when transcribed, is recognized by the host cell as a signal to add polyadenosine residues to transcribed mRNA. Any polyadenylation sequence that is functional in the host cell of choice may be used. Useful polyadenylation sequences for yeast cells are described by Guo and Sherman, 1995, Mol. Cellular Biol. 15: 5983-5990. Preferred polyadenylation sequences for filamentous fungal host cells are obtained from the genes for Aspergillus nidulans anthranilate synthase, Aspergillus niger glucoamylase, Aspergillus niger alpha-glucosidase, Aspergillus oryzae TAKA amylase, and Fusarium oxysporum trypsin-like protease.

[0197] It may also be desirable to add regulatory sequences that allow the regulation of the expression of the polypeptide relative to the growth of the host cell. Examples of regulatory systems are those that cause the expression of the gene to be turned on or off in response to a chemical or physical stimulus, including the presence of a regulatory compound. Regulatory systems in prokaryotic systems include the lac, tac, and trp operator systems. In yeast, the ADH2 system or GAL1 system may be used. In filamentous fungi, the Aspergillus niger glucoamylase promoter, Aspergillus oryzae TAKA alpha-amylase promoter, and Aspergillus oryzae glucoamylase promoter may be used. Other examples of regulatory sequences are those that allow for gene amplification. In eukaryotic systems, these regulatory sequences include the dihydrofolate reductase gene that is amplified in the presence of methotrexate, and the metallothionein genes that are amplified with heavy metals. In these cases, the polynucleotide encoding the polypeptide would be operably linked with the regulatory sequence.

[0198] The vectors may contain one or more (e.g., two, several) selectable markers that permit easy selection of transformed, transfected, transduced, or the like cells. A selectable marker is a gene the product of which provides for biocide or viral resistance, resistance to heavy metals, prototrophy to auxotrophs, and the like.

[0199] Examples of bacterial selectable markers are Bacillus licheniformis or Bacillus subtilis dal genes, or markers that confer antibiotic resistance such as ampicillin, chloramphenicol, kanamycin, neomycin, spectinomycin or tetracycline resistance. Suitable markers for yeast host cells include, but are not limited to, ADE2, HIS3, LEU2, LYS2, MET3, TRP1, and URA3. Selectable markers for use in a filamentous fungal host cell include, but are not limited to, amdS (acetamidase), argB (ornithine carbamoyltransferase), bar (phosphinothricin acetyltransferase), hph (hygromycin phosphotransferase), niaD (nitrate reductase), pyrG (orotidine-5′-phosphate decarboxylase), sC (sulfate adenyltransferase), and trpC (anthranilate synthase), as well as equivalents thereof. Preferred for use in an Aspergillus cell are Aspergillus nidulans or Aspergillus oryzae amdS and pyrG genes and a Streptomyces hygroscopicus bar gene.

[0200] The vectors may contain one or more (e.g., two, several) elements that permit integration of the vector into the host cell's genome or autonomous replication of the vector in the cell independent of the genome.

[0201] For integration into the host cell genome, the vector may rely on the polynucleotide's sequence encoding the polypeptide or any other element of the vector for integration into the genome by homologous or non-homologous recombination. Alternatively, the vector may contain additional polynucleotides for directing integration by homologous recombination into the genome of the host cell at a precise location(s) in the chromosome(s). To increase the likelihood of integration at a precise location, the integrational elements should contain a sufficient number of nucleic acids, such as 100 to 10,000 base pairs, 400 to 10,000 base pairs, and 800 to 10,000 base pairs, which have a high degree of sequence identity to the corresponding target sequence to enhance the probability of homologous recombination. The integrational elements may be any sequence that is homologous with the target sequence in the genome of the host cell. Furthermore, the integrational elements may be non-encoding or encoding polynucleotides. On the other hand, the vector may be integrated into the genome of the host cell by non-homologous recombination. Potential integration loci include those described in the art (e.g., See US2012/0135481).

[0202] For autonomous replication, the vector may further comprise an origin of replication enabling the vector to replicate autonomously in the yeast cell. The origin of replication may be any plasmid replicator mediating autonomous replication that functions in a cell. The term “origin of replication” or “plasmid replicator” means a polynucleotide that enables a plasmid or vector to replicate in vivo.

[0203] Examples of bacterial origins of replication are the origins of replication of plasmids pBR322, pUC19, pACYC177, and pACYC184 permitting replication in E. coli, and pUB110, pE194, pTA1060, and pAMβ1 permitting replication in Bacillus.

[0204] Examples of origins of replication for use in a yeast host cell are the 2 micron origin of replication, ARS1, ARS4, the combination of ARS1 and CEN3, and the combination of ARS4 and CEN6.

[0205] Examples of origins of replication useful in a filamentous fungal cell are AMA1 and ANSI (Gems et al., 1991, Gene 98: 61-67; Cullen et al., 1987, Nucleic Acids Res. 15: 9163-9175; WO 00/24883). Isolation of the AMA1 gene and construction of plasmids or vectors comprising the gene can be accomplished according to the methods disclosed in WO 00/24883.

[0206] More than one copy of a polynucleotide described herein may be inserted into a host cell to increase production of a polypeptide. An increase in the copy number of the polynucleotide can be obtained by integrating at least one additional copy of the sequence into the yeast cell genome or by including an amplifiable selectable marker gene with the polynucleotide where cells containing amplified copies of the selectable marker gene, and thereby additional copies of the polynucleotide, can be selected for by cultivating the cells in the presence of the appropriate selectable agent.

[0207] The procedures used to ligate the elements described above to construct the recombinant expression vectors described herein are well known to one skilled in the art (see, e.g., Sambrook et al., 1989, supra).

[0208] Additional procedures and techniques known in the art for the preparation of recombinant cells comprising one or more 3-HP pathway genes, are described in, e.g., WO 2012/074818, the content of which is hereby incorporated by reference.

### Gene Disruptions

[0209] The recombinant cell may also comprise one or more (e.g., two, several) gene disruptions, e.g., to divert sugar metabolism from undesired products to 3-HP. In some aspects, the recombinant host cells produce a greater amount of 3-HP compared to the cell without the one or more disruptions when cultivated under identical conditions. In some aspects, one or more of the disrupted endogenous genes are inactivated.

[0210] In certain embodiments, the recombinant cells provided herein comprise a disruption of one or more endogenous genes encoding an enzyme involved in ethanol fermentation, including for example pyruvate decarboxylase (PDC, converts pyruvate to acetaldehyde) and/or alcohol dehydrogenase (ADH, converts acetaldehyde to ethanol) genes. These modifications decrease the ability of the cell to produce ethanol, thereby maximizing 3-HP production. However, in certain embodiments the recombinant cells provided herein may be engineered to co-produce 3-HP and ethanol. In those embodiments, endogenous genes encoding an enzyme involved in ethanol fermentation are preferably not disrupted, and in certain embodiments the cells may comprise one or more heterologous genes that increase ethanol production.

[0211] In some embodiments, the recombinant cells comprise a disruption to an endogenous gene encoding a PDC having at least 75%, e.g., at least 80%, at least 85%, at least 90%, at least 95%, at least 96%, at least 97%, at least 98%, at least 99%, or 100% sequence identity to SEQ ID NO: 154. In some embodiments, the endogenous gene encodes a PDC having an amino acid sequence comprising or consisting of SEQ ID NO: 154. In some embodiments, the coding sequence of the endogenous gene encoding the PDC has at least 75%, e.g., at least 80%, at least 85%, at least 90%, at least 95%, at least 96%, at least 97%, at least 98%, at least 99%, or 100% sequence identity to SEQ ID NO: 153. In some embodiments, the coding sequence of the endogenous gene encoding the PDC comprises or consists of SEQ ID NO: 153. In some embodiments, the endogenous gene encoding the PDC is inactivated.

[0212] In certain embodiments, the recombinant cells provided herein comprise a disruption of one or more endogenous genes encoding enzymes involved in producing alternate fermentative products such as glycerol or other byproducts such as acetate or diols. For example, the cells provided herein may comprise a disruption of one or more of glycerol 3-phosphate dehydrogenase (GPD, catalyzes reaction of dihydroxyacetone phosphate to glycerol 3-phosphate), glycerol 3-phosphatase (GPP, catalyzes conversion of glycerol-3 phosphate to glycerol), glycerol kinase (catalyzes conversion of glycerol 3-phosphate to glycerol), dihydroxyacetone kinase (catalyzes conversion of dihydroxyacetone phosphate to dihydroxyacetone), glycerol dehydrogenase (catalyzes conversion of dihydroxyacetone to glycerol), aldehyde dehydrogenase (ALD, e.g., converts acetaldehyde to acetate or 3-HP to 3-HPA), and butanediol dehydrogenase (catalyzes conversion of butanediol to acetoin and vice versa) genes.

[0213] In some embodiments, the recombinant cells comprise a disruption to an endogenous gene encoding a GPD having at least 75%, e.g., at least 80%, at least 85%, at least 90%, at least 95%, at least 96%, at least 97%, at least 98%, at least 99%, or 100% sequence identity to SEQ ID NO: 156. In some embodiments, the endogenous gene encodes a GPD having an amino acid sequence comprising or consisting of SEQ ID NO: 156. In some embodiments, the coding sequence of the endogenous gene encoding the GPD has at least 75%, e.g., at least 80%, at least 85%, at least 90%, at least 95%, at least 96%, at least 97%, at least 98%, at least 99%, or 100% sequence identity to SEQ ID NO: 155. In some embodiments, the coding sequence of the endogenous gene encoding the GPD comprises or consists of SEQ ID NO: 155. In some embodiments, the endogenous gene encoding the GPD is inactivated.

[0214] In certain embodiments, the recombinant cells provided herein comprise a disruption of one or more endogenous genes encoding enzymes that catalyze a reverse reaction in a 3-HP pathway, including for example PEP carboxykinase (PCK), enzymes with OAA decarboxylase activity, or CYB2A or CYB2B (catalyzes the conversion of lactate to pyruvate). PCK catalyzes the conversion of PEP to OAA and vice versa, but exhibits a preference for the OAA to PEP reaction. To reduce the conversion of OAA to PEP, one or more copies of a native PCK gene may be disrupted. In certain embodiments, cells in which one or more native PCK genes have been disrupted may express one or more heterologous PCK genes that have been mutated to encode a polypeptide favoring the conversion of PEP to OAA. OAA decarboxylase catalyzes the conversion of OAA to pyruvate. Enzymes with OAA decarboxylase activity have been identified, such as that coded by the Entner-Doudoroff aldolase (eda) gene in E. coli and malic enzyme (MAE) in yeast and fungi. To reduce OAA decarboxylase activity, one or more copies of a native gene encoding an enzyme with OAA decarboxylase activity may be disrupted. In certain embodiments, cells in which one or more native OAA decarboxylation genes have been disrupted may express one or more heterologous OAA decarboxylation genes that have been mutated to encode a polypeptide that catalyzes the conversion of pyruvate to OAA.

[0215] In certain embodiments, the recombinant cells provided herein comprise a disruption to one or more genes selected from dse2, scw11, eaf3, sed1, and sam2. (See, e.g., Suzuki et al, J. Biosci. Bioeng. 2013, 115, 467-474; and Dato et al., Microbial Cell Factories, 2014, 13, 147).

[0216] In certain embodiments, the recombinant cells provided herein comprise a disruption of one or more endogenous genes encoding an enzyme involved in an undesirable reaction with a 3-HP pathway product or intermediate. Examples of such genes include those encoding an enzyme that converts 3-HP to an aldehyde of 3-HP, which are known to be toxic to certain cells.

[0217] In certain embodiments, the recombinant cells provided herein comprise a disruption of one or more endogenous genes encoding an enzyme that has a neutral effect on a 3-HP pathway, including for example GALE (negative regulator of the GAL system that converts galactose to glucose). Disruption of neutral genes allows for insertion of one or more heterologous genes without affecting native pathways.

[0218] Modeling can also be used to design gene disruptions that additionally optimize utilization of the pathway (see, for example, U.S. 2002/0012939, U.S. 2003/0224363, U.S. 2004/0029149, U.S. 2004/0072723, U.S. 2003/0059792, U.S. 2002/0168654, U.S. 2004/0009466, and U.S. Pat. No. 7,127,379). Modeling analysis allows reliable predictions of the effects on cell growth of shifting the metabolism towards more efficient production of 3-HP. One exemplary computational method for identifying and designing metabolic alterations favoring biosynthesis of a desired product is the OptKnock computational framework, Burgard et al., 2003, Biotechnol. Bioeng. 84: 647-657.

[0219] The recombinant cells comprising a gene disruption may be constructed using methods well known in the art, including those methods described herein. A portion of the gene can be disrupted such as the coding region or a control sequence required for expression of the coding region. Such a control sequence of the gene may be a promoter sequence or a functional part thereof, i.e., a part that is sufficient for affecting expression of the gene. For example, a promoter sequence may be inactivated resulting in no expression or a weaker promoter may be substituted for the native promoter sequence to reduce expression of the coding sequence. Other control sequences for possible modification include, but are not limited to, a leader, propeptide sequence, signal sequence, transcription terminator, and transcriptional activator.

[0220] The recombinant cells comprising a gene disruption may be constructed by gene deletion techniques to eliminate or reduce expression of the gene. Gene deletion techniques enable the partial or complete removal of the gene thereby eliminating their expression. In such methods, deletion of the gene is accomplished by homologous recombination using a plasmid that has been constructed to contiguously contain the 5′ and 3′ regions flanking the gene.

[0221] The recombinant cells comprising a gene disruption may also be constructed by introducing, substituting, and/or removing one or more (e.g., two, several) nucleotides in the gene or a control sequence thereof required for the transcription or translation thereof. For example, nucleotides may be inserted or removed for the introduction of a stop codon, the removal of the start codon, or a frame-shift of the open reading frame. Such a modification may be accomplished by site-directed mutagenesis or PCR generated mutagenesis in accordance with methods known in the art. See, for example, Botstein and Shortle, 1985, Science 229: 4719; Lo et al., 1985, Proc. Natl. Acad. Sci. U.S.A. 81: 2285; Higuchi et al., 1988, Nucleic Acids Res 16: 7351; Shimada, 1996, Meth. Mol. Biol. 57: 157; Ho et al., 1989, Gene 77: 61; Horton et al., 1989, Gene 77: 61; and Sarkar and Sommer, 1990, Bio Techniques 8: 404.

[0222] The recombinant cells comprising a gene disruption may also be constructed by inserting into the gene a disruptive nucleic acid construct comprising a nucleic acid fragment homologous to the gene that will create a duplication of the region of homology and incorporate construct DNA between the duplicated regions. Such a gene disruption can eliminate gene expression if the inserted construct separates the promoter of the gene from the coding region or interrupts the coding sequence such that a non-functional gene product results. A disrupting construct may be simply a selectable marker gene accompanied by 5′ and 3′ regions homologous to the gene. The selectable marker enables identification of transformants containing the disrupted gene.

[0223] The recombinant cells comprising a gene disruption may also be constructed by the process of gene conversion (see, for example, Iglesias and Trautner, 1983, Molecular General Genetics 189: 73-76). For example, in the gene conversion method, a nucleotide sequence corresponding to the gene is mutagenized in vitro to produce a defective nucleotide sequence, which is then transformed into the recombinant strain to produce a defective gene. By homologous recombination, the defective nucleotide sequence replaces the endogenous gene. It may be desirable that the defective nucleotide sequence also comprises a marker for selection of transformants containing the defective gene.

[0224] The recombinant cells comprising a gene disruption may be further constructed by random or specific mutagenesis using methods well known in the art, including, but not limited to, chemical mutagenesis (see, for example, Hopwood, The Isolation of Mutants in Methods in Microbiology (J. R. Norris and D. W. Ribbons, eds.) pp. 363-433, Academic Press, New York, 1970). Modification of the gene may be performed by subjecting the parent strain to mutagenesis and screening for mutant strains in which expression of the gene has been reduced or inactivated. The mutagenesis, which may be specific or random, may be performed, for example, by use of a suitable physical or chemical mutagenizing agent, use of a suitable oligonucleotide, or subjecting the DNA sequence to PCR generated mutagenesis. Furthermore, the mutagenesis may be performed by use of any combination of these mutagenizing methods.

[0225] Examples of a physical or chemical mutagenizing agent suitable for the present purpose include ultraviolet (UV) irradiation, hydroxylamine, N-methyl-N′-nitro-N-nitrosoguanidine (MNNG), N-methyl-N′-nitrosogaunidine (NTG) O-methyl hydroxylamine, nitrous acid, ethyl methane sulphonate (EMS), sodium bisulphite, formic acid, and nucleotide analogues. When such agents are used, the mutagenesis is typically performed by incubating the parent strain to be mutagenized in the presence of the mutagenizing agent of choice under suitable conditions, and selecting for mutants exhibiting reduced or no expression of the gene.

[0226] A nucleotide sequence homologous or complementary to a gene described herein may be used from other microbial sources to disrupt the corresponding gene in a recombinant strain of choice.

[0227] In one aspect, the modification of a gene in the recombinant cell is unmarked with a selectable marker. Removal of the selectable marker gene may be accomplished by culturing the mutants on a counter-selection medium. Where the selectable marker gene contains repeats flanking its 5′ and 3′ ends, the repeats will facilitate the looping out of the selectable marker gene by homologous recombination when the mutant strain is submitted to counter-selection. The selectable marker gene may also be removed by homologous recombination by introducing into the mutant strain a nucleic acid fragment comprising 5′ and 3′ regions of the defective gene, but lacking the selectable marker gene, followed by selecting on the counter-selection medium. By homologous recombination, the defective gene containing the selectable marker gene is replaced with the nucleic acid fragment lacking the selectable marker gene. Other methods known in the art may also be used.

### Methods of Producing 3-HP and Related Compounds

[0228] The recombinant cells described herein may be used for the production of 3-HP. In one aspect is a method of producing 3-HP, comprising: (a) cultivating any one of the recombinant cells described herein (e.g., a recombinant host cell comprising an active 3-HP pathway and a heterologous polynucleotide encoding a 3-HPDH) in a medium under suitable conditions to produce the 3-HP; and (b) recovering the 3-HP.

[0229] The recombinant cells comprising an active 3-HP pathway may be cultivated in a nutrient medium suitable for 3-HP production using methods well known in the art. For example, the cells may be cultivated by shake flask cultivation, and small-scale or large-scale fermentation (including continuous, batch, fed-batch, or solid state fermentations) in laboratory or industrial fermentors performed in a suitable fermentation medium and under conditions allowing 3-HP production.

[0230] The recombinant cells may produce 3-HP in a fermentable medium comprising any one or more (e.g., two, several) sugars, such as glucose, fructose, sucrose, cellobiose, xylose, xylulose, arabinose, mannose, galactose, and/or soluble oligosaccharides. The carbon source may be a twelve carbon sugar such as sucrose, a hexose sugar such as glucose or fructose, glycan or other polymer of glucose, glucose oligomers such as maltose, maltotriose and isomaltotriose, panose, and fructose oligomers. If the cell is modified to impart an ability to ferment pentose sugars, the fermentation medium may include a pentose sugar such as xylose, xylan or other oligomer of xylose, and/or arabinose. Such pentose sugars are suitably hydrolysates of a hemicellulose-containing biomass. In some embodiments, the cell is unable to ferment pentose sugars and/or the fermentable medium comprises less than 1% pentose sugars. In some instances, the fermentable medium is derived from a natural source, such as sugar cane, starch, or cellulose, and may be the result of pretreating the source by enzymatic hydrolysis (saccharification). In some aspects, the fermentable medium comprises sugar cane juice. Suitable media are available from commercial suppliers, may be prepared according to published compositions (e.g., in catalogues of the American Type Culture Collection), or may be prepared from commercially available ingredients.

[0231] In addition to the appropriate carbon sources from one or more (e.g., two, several) sugar(s), the fermentable medium may contain other nutrients or stimulators known to those skilled in the art, such as macronutrients (e.g., nitrogen sources) and micronutrients (e.g., vitamins, mineral salts, and metallic cofactors). In some aspects, the carbon source can be preferentially supplied with at least one nitrogen source, such as yeast extract, N₂, peptone (e.g., Bacto™ Peptone), or soytone (e.g., Bacto™ Soytone). Non-limiting examples of vitamins include multivitamins, biotin, pantothenate, nicotinic acid, meso-inositol, thiamine, pyridoxine, para-aminobenzoic acid, folic acid, riboflavin, and Vitamins A, B, C, D, and E. Examples of mineral salts and metallic cofactors include, but are not limited to Na, P, K, Mg, S, Ca, Fe, Zn, Mn, Co, and Cu.

[0232] In some embodiments, the recombinant cells of the invention can be cultured in a chemically defined medium. In one example, the medium contains around 5 g/L ammonium sulfate, around 3 g/L potassium dihydrogen phosphate, around 0.5 g/L magnesium sulfate, trace elements, and vitamins and around 150 g/L glucose. The pH may be allowed to range freely during cultivation, or may be buffered if necessary to prevent the pH from falling below or rising above predetermined levels. In certain embodiments, the fermentation medium is inoculated with sufficient cells that are the subject of the evaluation to produce an OD₆₀₀ of about 1.0. Unless explicitly noted otherwise, OD₆₀₀ as used herein refers to an optical density measured at a wavelength of 600 nm with a 1 cm pathlength using a model DU600 spectrophotometer (Beckman Coulter).

[0233] Specific conditions used for the methods of 3-HP production may be determined by one skilled in the art in light of the teachings herein. In some aspects of the methods, the cells are cultivated for about 12 hours to about 216 hours, such as about 24 hours to about 144 hours, or about 36 hours to about 96 hours. The temperature is typically between about 26° C. to about 60° C., e.g., about 34° C. to about 50° C.

[0234] Cultivation may be performed under anaerobic, substantially anaerobic (microaerobic), or aerobic conditions, as appropriate. Briefly, anaerobic refers to an environment devoid of oxygen, substantially anaerobic (microaerobic) refers to an environment in which the concentration of oxygen is less than air, and aerobic refers to an environment wherein the oxygen concentration is approximately equal to or greater than that of the air. Substantially anaerobic conditions include, for example, a culture, batch fermentation or continuous fermentation such that the dissolved oxygen concentration in the medium remains less than 10% of saturation. Substantially anaerobic conditions also includes growing or resting cells in liquid medium or on solid agar inside a sealed chamber maintained with an atmosphere of less than 1% oxygen. The percent of oxygen can be maintained by, for example, sparging the culture with a N₂/CO₂ mixture or other suitable non-oxygen gas or gases. In some embodiments, the cultivation is performed under anaerobic conditions or substantially anaerobic conditions.

[0235] In one example, the concentration of cells in the fermentation medium is typically in the range of about 1 to 40, e.g., 2 to 20, or 3 to 10 gram dry cells/liter of fermentation medium during the production phase. If desired, oxygen uptake rate (OUR) can be varied throughout fermentation as a process control (see, e.g., WO03/102200). In some embodiments, the recombinant cells provided herein are cultivated under microaerobic conditions characterized by an oxygen uptake rate from 2 to 45 mmol/L/hr, e.g., 2 to 25, 2 to 20, 2 to 15, 2 to 10, 10 to 45, 15 to 40, 20 to 35, or 25 to 35 mmol/L/hr. In certain embodiments, the recombinant cells provided herein may perform especially well when cultivated under microaerobic conditions characterized by an oxygen uptake rate of from 2 to 25 mmol/L/hr. The medium may be buffered during the production phase such that the pH is maintained in a range of about 3.0 to about 7.0, or from about 4.0 to about 6.0. Suitable buffering agents are basic materials that neutralize the acid as it is formed, and include, for example, calcium hydroxide, calcium carbonate, sodium hydroxide, potassium hydroxide, potassium carbonate, sodium carbonate, ammonium carbonate, ammonia, ammonium hydroxide and the like. In general, those buffering agents that have been used in conventional fermentation processes are also suitable here.

[0236] In those embodiments where a buffered fermentation is utilized, acidic fermentation products may be neutralized to the corresponding salt as they are formed. In these embodiments, recovery of the acid involves regeneration of the free acid. This may be done by removing the cells and acidulating the fermentation broth with a strong acid such as sulfuric acid. This results in the formation of a salt by-product. For example, where a calcium salt is utilized as the neutralizing agent and sulfuric acid is utilized as the acidulating agent, gypsum is produced as a salt by-product. This by-product is separated from the broth, and the acid is recovered using techniques such as liquid-liquid extraction, distillation, absorption, and others (see, e.g., T. B. Vickroy, Vol. 3, Chapter 38 of Comprehensive Biotechnology, (ed. M. Moo-Young), Pergamon, Oxford, 1985; Datta et al., 1995, FEMS Microbiol. Rev. 16: 221-231; U.S. Pat. Nos. 4,275,234, 4,771,001, 5,132,456, 5,420,304, 5,510,526, 5,641,406, and 5,831,122, and WO 93/00440.

[0237] In other embodiments, the pH of the fermentation medium may be permitted to drop during cultivation from a starting pH that is at or above the pKa of 3-HP, typically 4.5 or higher (such as 5.5, 6.0 or 6.5), to at or below the pKa of the acid fermentation product, e.g., less than 4.5 or 4.0, such as in the range of about 1.5 to about 4.5, in the range of from about 2.0 to about 4.0, or in the range from about 2.0 to about 3.5.

[0238] In still other embodiments, fermentation may be carried out to produce a product acid by adjusting the pH of the fermentation broth to at or below the pKa of the product acid prior to or at the start of the fermentation process. The pH may thereafter be maintained at or below the pKa of the product acid throughout the cultivation. In certain embodiments, the pH may be maintained at less than 4.5 or 4.0, such as in a range of about 1.5 to about 4.5, in a range of about 2.0 to about 4.0, or in a range of about 2.0 to about 3.5.

[0239] The methods described herein can employ any suitable fermentation operation mode. For example, batch mode fermentation may be used with a close system where culture media and recombinant host cells, set at the beginning of fermentation, have no additional input except for the reagents certain reagents, e.g., for pH control, foam control or others required for process sustenance. The process described herein can also be employed in Fed-batch or continuous mode, as mentioned supra.

[0240] The methods described herein may be practiced in several bioreactor configurations, such as stirred tank, bubble column, airlift reactor and others known to those skilled in the art. The methods may be performed in free cell culture or in immobilized cell culture as appropriate. Any material support for immobilized cell culture may be used, such as alginates, fibrous bed, or argyle materials such as chrysotile, montmorillonite KSF and montmorillonite K-10.

[0241] In one aspect of the methods, the 3-HP is produced at a titer greater than about 5 g/L, e.g., greater than about 10 g/L, 25 g/L, 50 g/L, 75 g/L, 100 g/L, 125 g/L, 150 g/L, 160 g/L, 170 g/L, 180 g/L, 190 g/L, 200 g/L, 210 g/L, 225 g/L, 250 g/L, 275 g/L, 300 g/L, 325 g/L, 350 g/L, 400 g/L, or 500 g/L; or between about 10 g/L and about 500 g/L, e.g., between about 50 g/L and about 350 g/L, about 100 g/L and about 300 g/L, about 150 g/L and about 250 g/L, about 175 g/L and about 225 g/L, or about 190 g/L and about 210 g/L. In one embodiment, the 3-HP is produced at a titer greater than about 0.01 gram per gram of carbohydrate, e.g., greater than about 0.02, 0.05, 0.75, 0.1, 0.2, 0.3, 0.4, 0.5, 0.6, 0.7, 0.8, 0.9, or 1.0 gram per gram of carbohydrate.

[0242] In one aspect of the methods, the amount of produced 3-HP is at least 5%, e.g., at least 10%, at least 15%, at least 20%, at least 25%, at least 30%, at least 50%, or at least 100% greater compared to cultivating the recombinant cell without the heterologous polynucleotide encoding the 3-HPDH when cultivated under the same conditions.

[0243] In certain embodiments of the methods provided herein, the recombinant cells produce relatively low levels of ethanol. In certain embodiments, ethanol may be produced in a yield of 10% or less, preferably in a yield of 2% or less. In certain of these embodiments, ethanol is not detectably produced. In other embodiments, however, 3-HP and ethanol may be co-produced. In these embodiments, ethanol may be produced at a yield of greater than 10%, greater than 25%, or greater than 50%.

[0244] The 3-HP can be optionally recovered from the fermentation medium using any procedure known in the art including, but not limited to, chromatography (e.g., size exclusion chromatography, adsorption chromatography, ion exchange chromatography), electrophoretic procedures, differential solubility, osmosis, distillation, extraction (e.g., liquid-liquid extraction), pervaporation, extractive filtration, membrane filtration, membrane separation, reverse, or ultrafiltration. In one aspect, the 3-HP is separated from other fermented material and purified by conventional methods of distillation. Accordingly, in one aspect, the method further comprises purifying the recovered 3-HP by distillation.

[0245] The recombinant 3-HP may also be purified by the chemical conversion of impurities (contaminants) to products more easily removed from 3-HP by the procedures described above (e.g., chromatography, electrophoretic procedures, differential solubility, distillation, or extraction) and/or by direct chemical conversion of impurities to 3-HP. For example, in one aspect, the method further comprises purifying recovered 3-HP by converting β-alanine contaminant to 3-HP, using chemical techniques known in the art.

[0246] In some aspects of the methods, the recombinant 3-HP preparation before and/or after being optionally purified is substantially pure. With respect to the methods of producing 3-HP, “substantially pure” intends a recovered preparation that contains no more than 15% impurity, wherein impurity intends compounds other than 3-HP. In one variation, a substantially pure preparation is provided wherein the preparation contains no more than 25% impurity, or no more than 20% impurity, or no more than 10% impurity, or no more than 5% impurity, or no more than 3% impurity, or no more than 1% impurity, or no more than 0.5% impurity.

[0247] 3-HP produced using the methods disclosed herein can be converted into other organic compounds (e.g., as described in U.S. Pat. No. 8,030,045 and WO 03/082795, the content of which is incorporated herein by reference). For example, 3-HP can be hydrogenated to form 1,3 propanediol, a valuable polyester monomer. Propanediol also can be created from 3-HP using polypeptides having oxidoreductase activity in vitro or in vivo (e.g., using one or more additional enzymatic activities as described supra). Hydrogenating an organic acid such as 3-HP can be performed using any method such as those used to hydrogenate succinic acid and/or lactic acid. For example, 3-HP can be hydrogenated using a metal catalyst. Accordingly, in one aspect is a method of producing 1,3-propanediol comprising: (a) cultivating a recombinant cell described herein (e.g., a recombinant host cell comprising an active 3-HP pathway and a heterologous polynucleotide encoding a 3-HPDH), wherein the recombinant cell further comprises oxidoreductase activity in a medium under suitable conditions to produce 1,3-propanediol; and (b) recovering the 1,3-propanediol. In another aspect is a method of producing 1,3-propanediol, comprising: (a) cultivating a recombinant cell described herein (e.g., a recombinant host cell comprising an active 3-HP pathway and a heterologous polynucleotide encoding a 3-HPDH) in a medium under suitable conditions to produce 3-HP; (b) recovering the 3-HP; (c) hydrogenating the 3-HP under suitable conditions to produce 1,3-propanediol; and (d) recovering the 1,3-propanediol.

[0248] 3-HP may also be converted to an ester of 3-HP, such as methyl 3-hydroxypropionate, ethyl 3-hydroxypropionate, propyl 3-hydroxypropionate, butyl 3-hydroxypropionate, or 2-ethylhexyl 3-hydroxypropionate. In one aspect is a method of producing a 3-HP ester comprising: (a) cultivating a recombinant cell described herein (e.g., a recombinant host cell comprising an active 3-HP pathway and a heterologous polynucleotide encoding a 3-HPDH), wherein the recombinant cell further comprises lipase or esterase activity in a medium under suitable conditions to produce a 3-HP ester; and (b) recovering the 3-HP ester. In another aspect is a method of producing a 3-HP ester, comprising: (a) cultivating a recombinant cell described herein (e.g., a recombinant host cell comprising an active 3-HP pathway and a heterologous polynucleotide encoding a 3-HPDH) in a medium under suitable conditions to produce 3-HP; (b) recovering the 3-HP; (c) esterifying the 3-HP under suitable conditions to produce a 3-HP ester; and (d) recovering the 3-HP ester. The recombinant host cells described herein may also be used to produce polymerized 3-HP in vitro or in vivo using techniques known in the art (e.g., Zhou et al Metab. Eng. 2011, 13(6), 777-785; and U.S. Pat. No. 8,030,045; the contents of which are hereby incorporated by reference).

[0249] The 3-HP produced by any of the methods described herein may be converted to acrylic acid. Acrylic acid can be produced by the chemical dehydration of 3-HP using techniques known in the art, e.g., heating in the presence of a catalyst (e.g., a solid oxide dehydration catalyst such as titania or alumina).

[0250] In one aspect is a method of producing acrylic acid or a salt thereof, comprising: (a) cultivating a recombinant cell described herein (e.g., a recombinant host cell comprising an active 3-HP pathway and a heterologous polynucleotide encoding a 3-HPDH) in a medium under suitable conditions to produce 3-HP; (b) recovering the 3-HP; (c) dehydrating the 3-HP under suitable conditions to produce acrylic acid or a salt thereof; and (d) recovering the acrylic acid or salt thereof.

[0251] Suitable assays to test for the production of 3-HP and derivatives thereof for the methods of production and cells described herein can be performed using methods known in the art. For example, final 3-HP product and intermediates (e.g., pyruvate), as well as other organic compounds, can be analyzed by methods such as HPLC (High Performance Liquid Chromatography), GC-MS (Gas Chromatography Mass Spectroscopy) and LC-MS (Liquid Chromatography-Mass Spectroscopy) or other suitable analytical methods using routine procedures well known in the art. The release of 3-HP in the fermentation broth can also be tested with the culture supernatant. Byproducts and residual sugar in the fermentation medium (e.g., glucose) can be quantified by HPLC using, for example, a refractive index detector for glucose and alcohols, and a UV detector for organic acids (Lin et al., Biotechnol. Bioeng. 90:775-779 (2005)), or using other suitable assay and detection methods well known in the art.

[0252] The present invention may be further described by the following numbered paragraphs:

[1] A recombinant yeast cell, comprising an active 3-HP pathway capable of producing 3-HP and a heterologous polynucleotide encoding a 3-hydroxypropionate dehydrogenase (3-HPDH), wherein the 3-HPDH comprises:

[0253] (a) deletion of the N-terminal mitochondrial target sequence (MTS) corresponding to amino acids 2-16 of SEQ ID NO: 197, and

[0254] (b) at least 60% sequence identity to amino acids 17-354 of SEQ ID NO: 197.

[2] The recombinant cell of paragraph [1], wherein the heterologous polynucleotide encodes a 3-HPDH having at least 60%, e.g., at least 65%, 70%, 75%, 80%, 85%, 90%, 95%, 97%, 98%, 99%, or 100% sequence identity to amino acids 17-354 of SEQ ID NO: 197.
[3] The recombinant cell of paragraph [1] or [2], wherein the heterologous polynucleotide encodes a 3-HPDH that differs by no more than ten amino acids, e.g., by no more than five amino acids, by no more than four amino acids, by no more than three amino acids, by no more than two amino acids, or by one amino acid from amino acids 17-354 of SEQ ID NO: 197.
[4] The recombinant cell of paragraph [1], wherein the heterologous polynucleotide encodes a 3-HPDH having an amino acid sequence consisting of SEQ ID NO: 199.
[5] The recombinant cell of any one of paragraphs [1]-[4], wherein the heterologous polynucleotide comprises a coding sequence having at least 60%, e.g., at least 65%, at least 70%, at least 75%, at least 80%, at least 85%, at least 90%, at least 95%, at least 96%, at least 97%, at least 98%, at least 99%, or 100% sequence identity to nucleotides 49-1062 of SEQ ID NO: 196.
[6] The recombinant cell of paragraph [1], wherein the heterologous polynucleotide has a coding sequence that consists of SEQ ID NO: 198.
[7] The recombinant cell of any one of paragraphs [1]-[6], wherein the heterologous polynucleotide comprises a coding sequence that hybridizes under at least low stringency conditions e.g., medium stringency conditions, medium-high stringency conditions, high stringency conditions, or very high stringency conditions with the full-length complementary strand of nucleotides 49-1062 of SEQ ID NO: 196.
[8] The recombinant cell of any one of paragraphs [1]-[7], wherein the 3-HPDH utilizes an NAD(H) cofactor.
[9] The recombinant cell of any one of paragraphs [1]-[8], wherein the 3-HPDH has an increased specificity for the cofactor NAD(H) compared to NADP(H) (e.g., greater than 2-fold, 5-fold, 10-fold, 20-fold, 50-fold, 100-fold, 200-fold, 500-fold, or 1000-fold specificity for NAD(H) compared to NADP(H)).
[10] The recombinant cell of any one of paragraphs [1]-[9], wherein the active 3-HP pathway proceeds through a malonate semialdehyde intermediate.
[11] The recombinant cell of any one of paragraphs [1]-[10], wherein the cell produces a greater amount of 3-HP (e.g., at least 10%, at least 15%, at least 20%, at least 25%, at least 30%, at least 35%, at least 40%, at least 45%, at least 50%, at least 75%, at least 100%, or at least 200% more) compared to the cell without the heterologous polynucleotide encoding the encoding a 3-hydroxypropionate dehydrogenase (3-HPDH) when cultivated under identical conditions.
[12] The recombinant cell of any one of paragraphs [1]-[11], wherein the cell produces a greater amount of 3-HP (e.g., at least 10%, at least 15%, at least 20%, at least 25%, at least 30%, at least 35%, at least 40%, at least 45%, at least 50%, at least 75%, at least 100%, or at least 200% more) compared to a second recombinant cell, when cultivated under identical conditions; wherein the second cell is identical to the yeast cell with the proviso that the second cell encodes the 3-HPDH of SEQ ID NO: 197 in place of the yeast cell 3-HPDH.
[13] The recombinant cell of any one of paragraphs [1]-[12], wherein the cell comprises a heterologous polynucleotide encoding an aspartate 1-decarboxylase (ADC).
[14] The recombinant cell of any one of paragraphs [1]-[13], wherein the cell is Crabtree-negative or Crabtree-positive.
[15] The recombinant cell of any one of paragraphs [1]-[14], wherein the cell belongs to a genus selected from Issatchenkia, Candida, Kluyveromyces, Pichia, Schizosaccharomyces, Torulaspora, Zygosaccharomyces, and Saccharomyces.
[16] The recombinant cell of paragraph [15], wherein the cell belongs to a clade selected from the I. orientalis/P. fermentans clade and the Saccharomyces clade.
[17] The recombinant cell of paragraph [15], wherein the cell is selected from I. orientalis (e.g., CNB1), C. lambica, and S. bulderi.
[18] The recombinant cell of any one of paragraphs [1]-[17], wherein the yeast cell is unable to ferment pentose sugars.
[19] The recombinant cell of any one of paragraphs [1]-[18], wherein said cell further comprises a disruption to one or more endogenous dse2, scw11, eaf3, sed1, or sam2 genes, and/or one or more endogenous genes encoding a PDC, ADH, GALE, CYB2A, CYB2B, GPD, GPP, ALD, or PCK.
[20] The recombinant cell of any one of paragraphs 1-19, wherein said cell further comprises a disruption to an endogenous gene encoding a PDC.
[21] The recombinant cell of any one of paragraphs [1]-[20], wherein said cell further comprises a disruption to an endogenous gene encoding a GPD.
[22] A composition comprising the recombinant cell of any one of paragraphs [1]-[21].
[23] The composition of paragraph [22], wherein the composition comprises a fermentable medium.
[24] The composition of paragraph [23], wherein the fermentable medium comprises sucrose, glucose, and/or fructose.
[25] The composition of any one of paragraph [23] or [24], wherein the fermentable medium comprises less than 1% pentose sugars.
[26] The composition of any one of paragraphs [22]-[25], further comprising 3-HP.
[27] The composition of paragraph [26], wherein the 3-HP is at a titer greater than about 1 g/L, e.g., greater than about 2 g/L, 5 g/L, 10 g/L, 15 g/L, 20 g/L, 25 g/L, 30 g/L, 35 g/L, 40 g/L, 45 g/L, 50 g/L, 55 g/L, 60 g/L, 65 g/L, 70 g/L, 75 g/L, 80 g/L, 85 g/L, 90 g/L, 95 g/L, 100 g/L, 125 g/L, 150 g/L, 200 g/L, or 250 g/L.
[28] The composition of any one of paragraphs [22]-[27], wherein the medium is at a pH of less than 6.5, e.g., in the range of about 1.5 to about 4.5, about 2.0 to about 4.0, or about 2.0 to about 3.5.
[29] A method of producing 3-HP, comprising:

[0255] (a) cultivating the recombinant yeast cell of any one of paragraphs [1]-[21] in a fermentable medium under suitable conditions to produce 3-HP; and

[0256] (b) recovering the 3-HP.

[30] The method of paragraph [29], wherein the fermentable medium comprises sucrose, glucose, and/or fructose.
[31] The method of paragraph [29] or [30], wherein the fermentable medium comprises less than 1% pentose sugars.
[32] The method of any one of paragraphs [29]-[31], wherein the produced 3-HP is at a titer greater than about 1 g/L, e.g., greater than about 2 g/L, 5 g/L, 10 g/L, 15 g/L, 20 g/L, 25 g/L, 30 g/L, 35 g/L, 40 g/L, 45 g/L, 50 g/L, 55 g/L, 60 g/L, 65 g/L, 70 g/L, 75 g/L, 80 g/L, 85 g/L, 90 g/L, 95 g/L, 100 g/L, 125 g/L, 150 g/L, 200 g/L, or 250 g/L.
[33] The method of any one of paragraphs [29]-[32], wherein the resulting 3-HP is substantially pure.
[34] The method of any one of paragraphs [29]-[33], wherein the fermentable medium is at a pH of less than 6.5, e.g., in the range of about 1.5 to about 4.5, about 2.0 to about 4.0, or about 2.0 to about 3.5.
[35] A method of producing acrylic acid or a salt thereof, comprising:

[0257] (a) cultivating the recombinant cell of any one of paragraphs [1]-[21] in a fermentable medium under suitable conditions to produce 3-HP;

[0258] (b) recovering the 3-HP;

[0259] (c) dehydrating the 3-HP under suitable conditions to produce acrylic acid or a salt thereof; and

[0260] (d) recovering the acrylic acid or salt thereof.

[36] A method of producing a 3-HP ester, comprising:

[0261] (a) cultivating the recombinant cell of any one of paragraphs [1]-[21] in a fermentable medium under suitable conditions to produce 3-HP;

[0262] (b) recovering the 3-HP;

[0263] (c) esterifying the 3-HP under suitable conditions to produce a 3-HP ester; and

[0264] (d) recovering the 3-HP ester

[37] A method of producing 1,3-propanediol, comprising:

[0265] (a) cultivating the recombinant cell of any one of paragraphs [1]-[21] in a fermentable medium under suitable conditions to produce 3-HP;

[0266] (b) recovering the 3-HP;

[0267] (c) hydrogenating the 3-HP under suitable conditions to produce 1,3-propanediol; and

[0268] (d) recovering the 1,3-propanediol.

[38] The method of any one of paragraphs [29]-[37] wherein the recombinant cell is a CNB1 cell cultivated in a fermentable medium comprising less than 1% pentose sugars.

[0269] The following examples are provided by way of illustration and are not intended to be limiting of the invention.

### EXAMPLES

[0270] Chemicals used as buffers and substrates were commercial products of at least reagent grade.

### Strains

[0271] The strain MeJi412 was constructed from I. orientalis CD1822 as described in WO 2012/074818 (the content of which is incorporated herein by reference) and expresses an ADC gene to provide an active 3-HP pathway that proceeds through a malonate semialdehyde intermediate.

[0272] The strains McTs244/McTs259 were constructed from I. orientalis MeJi412, as described in WO 2012/074818 (the content of which is incorporated herein by reference), and further comprises a disruption of the native 3-HPDH gene.

[0273] The strain MBin556 was constructed from I. orientalis McTs259, as described in WO 2013/049073 (the content of which is incorporated herein by reference), and further expresses the native 3-HPDH at the adh9091 locus.

[0274] The strain McTs263 was constructed from I. orientalis McTs259, as described in WO 2012/074818 (the content of which is incorporated herein by reference), and further expresses the E. coli 3-HPDH of SEQ ID NO: 27 at the adh9091 locus.

[0275] The strain McTs276 was constructed from I. orientalis McTs259, as described in WO 2013/049073 (the content of which is incorporated herein by reference), and further expresses the P. putida 3-HPDH of SEQ ID NO: 30 at the adh9091 locus.

### Media and Solutions

[0276] 2X YT+amp plates were composed of 16 g/L tryptone, 10 g/L yeast extract, 5 g/L NaCl, 100 mg/L ampicillin, and 15 g/L Bacto agar.

[0277] ura selection plates were composed of 6.7 g yeast nitrogen base with ammonium sulfate, 5 g casamino acids, 100 mL 0.5 M succinic acid pH 5, 20 g Noble agar, and 855 mL deionized water. Following autoclave sterilization, 40 mL sterile 50% glucose and 2 mL 10 mg/mL chloraphenicol were added and plates poured.

[0278] ura selection media was composed of 6.7 g yeast nitrogen base with ammonium sulfate, 5 g casamino acids, 100 mL 0.5 M succinic acid pH 5, and 855 mL deionized water. Following autoclave sterilization, 40 mL sterile 50% glucose and 2 mL 10 mg/mL chloraphenicol were added.

[0279] YP+10% glucose media was composed of 500 mL YP broth and 100 mL sterile 50% glucose.

[0280] YP broth was composed of 10 g/L of yeast extract, 20 g/L of peptone.

[0281] TBE was composed of 10.8 g/L of Tris base, 5.5 g/L boric acid, and 4 mL/L of 0.5 M EDTA pH 8.0.

[0282] LiOAc/TE solution was composed of 8 parts sterile water, 1 part 1 M LiOAc, and 1 part 10× TE.

[0283] 10× TE (200 mL) was composed of 2.42 g Tris Base, 4 mL 0.5M EDTA, pH 8.0. 5 M HCl was used to adjust the pH to 7.5 and the solution was sterilized by autoclave.

[0284] PEG/LiOAc/TE Solution was composed of 8 parts 50% PEG3350, 1 part 1 M LiOAc, and 1 part 10× TE.

[0285] 50% PEG3350 was prepared by adding 100 g PEG3350 to 150 mL water and heating and stirring until dissolved. The volume was then brought up to 200 mL with water and the sterilized by autoclave.

[0286] Trace element solution was composed of EDTA (15.0 g/L), zinc sulfate heptahydrate (4.5 g/L), manganese chloride dehydrate (1.0 g/L), Cobalt(II)chloride hexahydrate (0.3 g/L), Copper(II)sulfate pentahydrate (0.3 g/L), disodium molybdenum dehydrate (0.4 g/L), calcium chloride dehydrate (4.5 g/L), iron sulphate heptahydrate (3 g/L), boric acid (1.0 g/L), and potassium iodide (0.1 g/L).

[0287] Vitamin solution was composed of biotin (D−; 0.05 g/L), calcium pantothenate (D+; 1 g/L), nicotinic acid (5 g/L), myo-inositol (25 g/L), pyridoxine hydrochloride (1 g/L), p-aminobenzoic acid (0.2 g/L), and thiamine hydrochloride (1 g/L).

[0288] CNB1 shake flask media was composed of urea (2.3 g/L), magnesium sulfate heptahydrate (0.5 g/L), potassium phosphate monobasic (3.0 g/L), trace element solution (1 mL/L) and vitamin solution (1 mL/L), glucose (120.0 g/L), 2-(N-Morpholino)ethanesulfonic acid (MES) (97.6 g/L). After dissolving all medium components, the pH of the medium was adjusted to an initial pH of 5.8 using an appropriate base (e.g., KOH).

TABLE 1
Primers sequences

| | SEQ | |
|---|---|---|
| | ID | |
| Identifier | NO: | Sequence (5′-3′) |
| 611245 | 200 | CGAACCAATTCAAGAAAACCAAC |
| 611815 | 201 | CTCCTTCATTTAACTATACCAGACG |
| 612794 | 202 | GAAGGGGGTCCAAGTTATCC |
| 612795 | 203 | CCAACAATCTTAATTGGTGAC |
| 612908 | 204 | GATATGGGCGGTAGAGAAGA |
| 612909 | 205 | GCTCCTTCAAAGGCAACACA |
| 613034 | 206 | TGATTCCTTCAATCACAGGT |
| 613241 | 207 | GCATGTCTGTTAACTCTCAAACCAT |
| 614626 | 208 | AGGGTACCTTAGTACGAAGG |
| 614627 | 209 | CTATTCTTACGATGAAGGCG |

### Example 1: Procedure for DNA Transformation

[0289] DNA transformation into the host genome to generate the recombinant strains described in the following examples was conducted based on the specific procedure below.

[0290] Three mL of YP+10% glucose media was added to a 14 mL Falcon tube and the desired strain was inoculated into this media using a sterile loop. The culture was grown with shaking at 250 rpm overnight (˜16 hr) at 37° C. 0.5 mL of the overnight culture was added to a 125 mL baffled flask containing 25 mL of liquid YP+10% glucose media. The flask was grown with shaking at 250 rpm at 37° C. Small aliquots of the culture were withdrawn at approximately hourly intervals and the OD₆₀₀ was measured. The culture was grown until the OD₆₀₀ was 0.6-1.0.

[0291] The cells were harvested by centrifugation at 2279×g at room temperature, the pellet was resuspended in 25 mL sterile water, then centrifuged at 2279×g at room temperature. The pellet was resuspended in 1 mL sterile water, and the resuspended cells were transferred to a 1.5 mL tube and then pelleted at 16,100×g. The cells were resuspended in 1 mL LiOAc/TE solution and then pelleted at 16,100×g. The cell pellet was then resuspended in 250 μL LiOAc/TE solution.

[0292] The following components were added to a 1.5 mL tube: 100 μL of the above cells, 10 μL freshly boiled then iced salmon sperm DNA (Agilent Technologies, Santa Clara, Calif., USA), and 10 μL of the desired, linearized transforming DNA. A control reaction with water instead of DNA was also prepared. To each transformation reaction, 600 μL of PEG/LiOAc/TE Solution was added, followed by 40 μL DMSO and the reactions were inverted several times to mix. The transformation reactions were incubated in a 42° C. water bath for 15 minutes, and cells were pelleted at 5,400×g for 1 min. Cells were resuspended in water, split in two, and each half of the transformation reaction was plated to a ura selection media plate. Plates were placed at 37° C. Colonies were visible after 2 days of growth.

### Example 2: Construction of an Insertion Vector for Expressing a Heterologous Candida albicans 3-Hydroxypropionate Dehydrogenase (3-HPDH) at the adh9091 Locus (pMcTs325)

[0293] The plasmid pMcTs317 was designed to allow integration of a coding sequence of the Candida albicans 3-HPDH (without the predicted mitochondrial targeting sequence) at the adh9091 locus under the control of the PDC promoter and terminator using URA3 as a selectable marker, and was constructed as described below.

[0294] A codon-optimized version of the 3-HPDH coding sequence from C. albicans without a mitochondrial signal sequence (SEQ ID NO: 198) and flanked by 5′ NheI and 3′ AscI restriction sites, was provided by GeneArt (Life Technologies Corporation) in a plasmid designated 14AA5JZP_HPD1_pMA. This plasmid was digested with AscI and then subjected to a Klenow Large Fragment (New England Biolabs) to generate blunt ends. The resulting DNA was purified using a QIAquick PCR Purification Kit (Qiagen), followed by digestion with NheI.

[0295] Plasmid pMBin204 (described in WO2012074818) was digested PacI, and then subjected to the Klenow Large Fragment (New England Biolabs) to generate blunt ends. The resulting DNA was purified using a QIAquick PCR Purification Kit (Qiagen) then digested with XbaI.

[0296] The resulting fragments of pMBin204 and 14AA5JZP_HPD1_pMA were separated by 1% TBE-agarose gel electrophoresis and visualized with a DARK READER™ (Clare Chemical Research). The desired 8.4 kbp fragment of pMBin204 and 1031 bp C. albicans 3-HPDH coding fragment were excised from the gel and purified using a NucleoSpin Gel and PCR clean up kit (Macherey-Nagel).

[0297] Cloning of the 14AA5JZP_HPD1_pMA DNA fragment containing the coding sequence of the C. albicans 3-HPDH coding sequence (supra) into the 8.4 kbp pMBin204 linearized vector (supra) was performed using T4 DNA ligase (New England Biolabs). The reaction mixture contained 1× T4 DNA ligase buffer, 1 μl T4 DNA ligase, 1 μl of the pMBin204 XbaI/PacI digested DNA fragment above, and 10 μl of the 14AA5JZP_HPD1_pMA DNA fragment above in total volume of 20 μl. The reaction mixture was incubated at room temperature for at least 1 hour and subsequently transformed into Stellar Competent Cells (Clontech) according to manufacturer's instructions. After a recovery period, two 100 μl aliquots from the transformation mixture were plated onto 150 mm 2XYT plates supplemented with 100 μg of ampicillin per ml and incubated overnight at 37° C. Putative recombinant colonies of the transformations were inoculated into 3 ml of LB medium supplemented with ampicillin (100 μg/ml). Plasmid DNA was prepared from these cultures using a BIOROBOT® 9600 workstation (Qiagen, Inc.) and analyzed by restriction digestion and sequencing. The plasmid DNA from one clone having the correct restriction digest pattern was designated pMcTs317 (FIG. 3).

[0298] Plasmid pMcTs317 contains a C. albicans 3-HPDH coding sequence (SEQ ID NO: 198, which encodes for SEQ ID NO: 199) under control of the PDC promoter and terminator, with the URA3 selectable marker flanked by regions of homology to the adh9091 locus. The 3-HPDH of SEQ ID NO: 199 lacks the predicted N-terminal mitochondrial targeting sequence MTS of amino acids 2-16 of SEQ ID NO: 197 but shares the remaining amino acids 17-354 of SEQ ID NO: 197 (See, FIG. 2).

### Example 3: Construction of a Recombinant Strain Expressing a Heterologous 3-Hydroxypropionate Dehydrogenase (3-HPDH) at the adh9091 Locus

[0299] Approximately 67 μg each of pMcTs317 from Example 3 was digested with ApaI, SacI and EheI and separated on a 1% agarose gel using 89 mM Tris base-89 mM Boric Acid-2 mM disodium EDTA (TBE) buffer. The desired approximately 5.6 kb fragment was excised from the gel and purified using NucleoSpin Gel and PCR clean up kit (Macherey-Nagel) according to the manufacturer's instructions. The linear construct was transformed into McTs259 (supra; See also WO2012074818) as described above.

[0300] Several single isolates from each transformation were screened for the site of integration as well as confirming that the other loci were still modified. The integration at adh9091 was confirmed by PCR using LongAmp Taq (New England Biolabs) according to the manufacturer's instructions using primers 614627+612909 and 612908+614626. The PCR product from 612908+614626 yielded an approximately 1.2 kb band and the product from 614627+612909 yielded an approximately 3.55 kb band. The modified adh1202 locus and modified YMR226c locus were also confirmed using primer sets 611245+612794 (to yield an approximately 3 kb band) and 611815+612795 (to yield an approximately 4 kb band) for the adh1202 locus, and primer set 613034+613241 for YMR226c locus (to yield an approximately 1.4 kb band). Three positive transformants with the correct size bands for the PCRs were designed McTs593, McTs594, and McTs595.

### Example 4: 3-HP Production and Enzymatic Activity of Recombinant Strains Containing an Active 3-HP Pathway and Expressing a Heterologous 3-Hydroxypropionate Dehydrogenase (3-HPDH)

[0301] Strains McTs593 (Example 3); MeJi412, McTs244, McTs263 (supra; See also WO2012074818); and MBin556, McTs276 (supra; See also WO2013049073) were grown in shake flasks according to the following procedure. The strains were streaked out for single colonies on Ura Selection Plates and incubated at 30° C. for 1-2 days. Seed cultures were prepared in 250 ml baffled flasks containing 50 mL CNB1 shake flask media inoculated with 1-2 colonies from the Ura Selection Plate. The seed cultures were grown for approximately 18 hours at 30° C. with shaking at 200 rpm. Small aliquots of the culture were then withdrawn to measure the OD600 until reaching an OD600 of 4-6. The seed flask cultivation was used to inoculate 125 ml baffled flasks containing 50 mL CNB1 shake flask media to an OD600=0.2. Cultures were incubated at 30° C. with shaking at 140 rpm for 20 hr. An aliquot of the sample was used to measure the optical density (OD) of the culture. The remainder of the sample was then centrifuged and samples from the supernatant were used for 3-HP analysis as described in WO2012074818. The cell pellet was then used for the 3-HPDH enzyme assay analysis. The results in Table 2 show that disruption of the native 3-HPDH gene results in no detectable 3-HP production (McTs244) and that 3-HP production can be restored by expressing a gene encoding the 3-HPDH from C. albicans without the predicted mitochondrial targeting sequence (SEQ ID NO: 199) at the adh9091 locus. The data also shows that a strain expressing the 3-HPDH from C. albicans without the predicted mitochondrial targeting sequence (McTs593) had improved 3-HP production when compared to McTs263 (expressing the E. coli 3-HPDH of SEQ ID NO: 27) and McTs276 (expressing the P. putida 3-HPDH of SEQ ID NO: 30).

[0302] The 3-HPDH activity of these strains was assayed using a forward malonate semi-aldehyde reductase assay by measuring the disappearance of either NADH or NADPH over time at 340 nm. Malonate semi-aldehyde was synthesized in-house according to the protocol developed by Yamada and Jacoby (Yamada, E. W., Jacoby, W. B., 1960, Direct conversion of malonic semialdehyde to acetyl-coenzyme A, Journal of Biological Chemistry, Volume 235, Number 3, pp. 589-594). The assay was performed in a 96 well micro-plate, and the final volume was 200 μL. The reaction was started by adding 10 μL of cleared cell extract into 190 μL of assay buffer (5 mM malonate semialdehyde, 50 mM potassium phosphate pH 6.0 and 0.5 mM either NADH or NADPH). Absorbance at 340 nm was followed on a micro-plate reader (Spectra Max 340PC, Molecular Devices LLC, Sunnyvale, Calif.) for 10 minutes at room temperature (˜25° C.). One unit was defined as the amount of enzyme necessary to oxidize 1 μmol of either NADH or NADPH in one minute in the presence of malonate semialdehyde at pH 6.0, 25° C. The results using the malonate semi-aldehyde reductase assay (Table 2) show that Applicant's recombinant strain expressing the 3-HPDH from C. albicans without the predicted mitochondrial targeting sequence (McTs593) had increased 3-HPDH activity with the NADH cofactor compared to similar strains expressing the native 3-HPDH (MBin556), E. coli 3-HPDH (McTs263), or P. putida 3-HPDH (McTs276).

TABLE 2

| | | | NADH | NADPH |
|---|---|---|---|---|
| | | | 3-HPDH | 3-HPDH |
| | | 3HP | activity | activity |
| | | (g/L)/ | (μmol/min/g) | (μmol/min/g) |
| Strain | 3-HPDH gene | OD600 | pH 6.0 | pH 6.0 |
| MeJi412 | Native I. orientalis 3-HPDH | 0.096 | 24 | 156 |
| McTs244 | Disrupted native I. orientalis 3-HPDH | 0.000 | 12 | 25 |
| MBin556 | McTs244 expressing I. orientalis 3- | 0.209 | 18 | 265 |
| | HPDH at adh9091 locus | | | |
| McTs263 | McTs244 expressing E. coli 3-HPDH at | 0.162 | 11 | 372 |
| | adh9091 locus | | | |
| McTs276 | McTs244 expressing P. putida 3- | 0.104 | 1985 | 182 |
| | HPDH at adh9091 locus | | | |
| McTs593 | McTs244 expressing C. albicans 3- | 0.194 | 5798 | 379 |
| | HPDH (w/o amino acids 2-16 of the | | | |
| | MTS) at adh9091 locus | | | |

### Example 5: Construction of an Insertion Vector for Expression of the Candida Albicans 3-Hydroxypropionate Dehydrogenase (3-HPDH) with the Complete Mitochondrial Targeting Sequence at the I. Orientalis adh9091 Locus (pMcTs355)

[0303] The plasmid pMcTs355 was designed to allow integration of a coding sequence of the Candida albicans 3-HPDH (with the full predicted mitochondrial targeting sequence) at the adh9091 locus under the control of the PDC promoter and terminator using URA3 as a selectable marker, and was constructed as described below.

[0304] A codon-optimized version of the 3-HPDH coding sequence from C. albicans with the full mitochondrial signal sequence and flanked by 5′ XbaI site and 3′ PacI restriction sites, was provided by GeneArt in a plasmid designated 15AAADHC. The plasmid was digested with XbaI and PacI and the resulting 1.1 kb fragment containing the C. albicans HPD1 gene was gel isolated and purified NucleoSpin Gel and PCR clean up kit (Macherey-Nagel).

[0305] Cloning of the DNA fragment containing C. albicans HPD1 into pMBin204 was performed using T4 DNA ligase (New England Biolabs). The reaction mixture contained 1×T4 DNA ligase buffer, 1 μl T4 DNA ligase, 1 μl of the pMBin204 XbaI/PacI digested DNA fragment above, and 5 μl of the C. albicans HPD1 3-HPDH with the mitochondrial targeting sequence digested product above in total volume of 20 μl. The reaction mixture was incubated at room temperature for at least 1 hour and subsequently used to transform Stellar (Clontech) according to manufacturer's instructions. After a recovery period, two 100 μl aliquots from the transformation mixture were plated onto 150 mm 2XYT plates supplemented with 100 μg of ampicillin per ml and incubated overnight at 37° C. Recombinant colonies of the transformations were each inoculated into 3 ml of LB medium supplemented with ampicillin (100 μg/ml). Plasmid DNA was prepared from these cultures using a BIOROBOT® 9600 workstation (QIAGEN Inc.) and subjected restriction digest checks. The plasmid DNA from one clone having the correct restriction digest pattern was further subjected to sequence analysis and designated pMcTs355 (FIG. 4).

[0306] Plasmid pMcTs355 contains a C. albicans 3-HPDH coding sequence (which encodes for SEQ ID NO: 197 containing the full mitrochondrial targeting sequence) under control of the PDC promoter and terminator, with the URA3 selectable marker flanked by regions of homology to the adh9091 locus. The 3-HPDH of SEQ ID NO: 197 contains the full predicted N-terminal mitochondrial targeting sequence MTS of amino acids 2-16 (See, FIG. 2).

### Example 6: Construction of an Insertion Vector for Expression of the Candida Albicans 3-Hydroxypropionate Dehydrogenase (3-HPDH) with Amino Acids 2-9 of the Mitochondrial Targeting Sequence Absent at the I. Orientalis adh9091 Locus (pMcTs354)

[0307] The plasmid pMcTs354 was designed to allow integration of a coding sequence of the Candida albicans 3-HPDH (without amino acids 2-9 of mitochondrial targeting sequence) at the adh9091 locus under the control of the PDC promoter and terminator using URA3 as a selectable marker, and was constructed as described below.

[0308] A codon-optimized version of the 3-HPDH coding sequence from C. albicans with amino acids 2-9 absent of the mitochondrial targeting sequence and flanked by 5′ XbaI site and 3′ PacI restriction sites, was provided by GeneArt as a DNA String designated 14AC3YPP. Cloning of the DNA fragment containing the coding sequence of the C. albicans HPD1 3-HPDH into pMBin204 was performed using InFusion HD (Clontech). The reaction mixture contained 1× InFusion HD Premix, 200 ng pMBin204 digested DNA fragment above, 51.2 ng 14AC3YPP DNA in total volume of 10 μl. The reaction mixture was incubated at 50° C. for 15 minutes and subsequently used to transform Stellar (Clontech) according to manufacturer's instructions. After a recovery period, two 100 μl aliquots from the transformation mixture were plated onto 150 mm 2XYT plates supplemented with 100 μg of ampicillin per ml and incubated overnight at 37° C. Recombinant colonies of the transformations were each inoculated into 3 ml of LB medium supplemented with ampicillin (100 μg/ml). Plasmid DNA was prepared from these cultures using a BIOROBOT® (Qiagen, Inc.) and analyzed by restriction digestion and sequencing. The plasmid DNA from one clone having the correct restriction digest pattern and C. albicans HPD1 3-HPDH with amino acids 2-9 absent of the mitochondrial targeting sequence was designated pMcTs354 (FIG. 5).

[0309] Plasmid pMcTs354 contains a partial C. albicans 3-HPDH coding sequence under control of the PDC promoter and terminator, with the URA3 selectable marker flanked by regions of homology to the adh9091 locus. The encoded 3-HPDH is SEQ ID NO: 197 minus amino acids 2-9 of the mitrochondrial targeting sequence.

### Example 7: Construction of Recombinant Strains Expressing Different Versions of a Heterologous 3-Hydroxypropionate Dehydrogenase (3-HPDH) at the adh9091 Locus

[0310] Approximately 10 μg each of construct pMcTs355 and pMcTs354 (from Examples 5 and 6, respectively) were digested with ApaI, SacI and EheI and the fragments separated on a 0.7% agarose gel using 89 mM Tris base-89 mM Boric Acid-2 mM disodium EDTA (TBE) buffer. Fragments of approximately 5.6 kb were excised from the gel and extracted using NucleoSpin Gel and PCR clean up kit (Macherey-Nagel) according to the manufacturer's instructions. The linear constructs from plasmids pMcTs354 and pMcTs355 were transformed into strain McTs259 (supra; See also WO2012074818).

[0311] Several single isolates from each transformation were screened for the site of integration as well as confirming that the other loci were still modified. The integration at adh9091 was confirmed by LongAmp Taq (New England Biolabs) according to the manufacturer's instructions with primers 614627+1209957 and 1209956+614626. The PCR product from 614627+1209957=2.0 kb and 1209956+614626=3.3 kb regardless of integration cassette pMcTs354 or pMcTs355 integrants. The adh1202 locus and YMR226c locus were also confirmed using primer sets 611245+612794=3 kb and 611815+612795=3.6 kb for adh1202 locus and 613034+613241=1.4 kb for YMR226c locus. For each integration cassette 2 transformants with the correct size bands for the PCRs were isolated: McTs812 and McTs813 (for the C. albicans 3-HPDH with amino acids 2-9 absent of the mitochondrial targeting sequence) and McTs848 and McTs849 (for the C. albicans 3-HPDH with the complete mitochondrial targeting sequence).

### Example 8: 3-HP Production and Enzymatic Activity of Recombinant Host Strains Containing an Active 3-HP Pathway and Expressing Different Versions of the Heterologous C. albicans 3-Hydroxypropionate Dehydrogenase (3-HPDH)

[0312] Strains McTs244 and MeJi412 (supra; See also WO2012074818), MBin556 (supra; See also WO2013049073), McTs593 (Example 3), and strains McTs812, McTs813, McTs848, and McTs849 (Example 7) were grown in shake flasks according to the following procedure. The strains were streaked out for single colonies on Ura Selection Plates and incubated at 30° C. for 1-2 days. Seed cultures were prepared in 250 ml baffled flasks containing 50 mL CNB1 shake flask media inoculated with 1-2 colonies from the Ura Selection Plate. The seed cultures were grown for approximately 18 hours at 30° C. with shaking at 200 rpm. Small aliquots of the culture were then withdrawn to measure the OD600 until reaching an OD600 of 4-6. The seed flask cultivation was used to inoculate 125 ml baffled flasks containing 50 mL CNB1 shake flask media to an OD600=0.2. Cultures were incubated at 30° C. with shaking at 140 rpm for 20 hr. An aliquot of the sample was used to measure the optical density (OD) of the culture. The rest of the sample was then centrifuged and samples from the supernatant were used for 3-HP analysis as described in WO2012074818. The cell pellet was then used for the 3HPDH enzyme assay analysis.

[0313] The results in Table 3 show that disruption of the native 3-HPDH gene of MeJi412 results in almost no detectable 3-HP production (McTs244) and that 3-HP production can be restored by expressing a gene encoding the 3-HPDH from C. albicans without the predicted mitochondrial targeting sequence (McTs593) at the adh9091 locus. The data also shows that 3-HP production is significantly less for comparable strains expressing the 3-HPDH from C. albicans having only a partial deletion of the mitochondrial targeting sequence (McTs812 and McTs813), and almost no detectable 3-HP production for comparable strains expressing the 3-HPDH from C. albicans with the full mitochondrial targeting sequence (McTs848 and McTs849).

[0314] The 3HPDH activity of these strains was assayed using a forward malonate semi-aldehyde reductase assay by measuring the disappearance of either NADH or NADPH over time at 340 nm. Malonate semi-aldehyde was synthesized in-house according to the protocol developed by Yamada and Jacoby (1960) “Direct conversion of malonic semialdehyde to acetyl-coenzyme A”, J. Biol. Chem., 235(3): 589-594. The assay was performed in a 96 well micro-plate, and the final volume was 200 μL. The reaction was started by adding 10 μL of cleared cell extract into 190 μL of assay buffer (5 mM malonate semialdehyde, 50 mM potassium phosphate pH 6.0 and 0.5 mM either NADH or NADPH). Absorbance at 340 nm was followed on a micro-plate reader (Spectra Max 340PC, Molecular Devices LLC, Sunnyvale, Calif.) for 10 minutes at room temperature (˜25° C.). One unit was defined as the amount of enzyme necessary to oxidize 1 μmol of either NADH or NADPH in one minute in the presence of malonate semialdehyde at pH 6.0, 25° C. The results using the malonate semi-aldehyde reductase assay (Table 3) show that recombinant strain expressing the 3-HPDH from C. albicans with the full mitochondrial targeting sequence (McTs848/McTs849) have 3-HPDH activity in the whole cell lysate (confirming that the protein is expressed) but, based on the 3HP production results, it is not in the part of the cell necessary for the 3HPDH to occur to generate 3-HP. Further, the recombinant strains expressing the 3-HPDH from C. albicans with the full mitochondrial targeting sequence (McTs848/McTs849) or only a partial deletion of the mitochondrial targeting sequence (McTs812 and McTs813) all show significantly reduced NADH 3-HPDH activity compared to the recombinant strain expressing the 3-HPDH from C. albicans without the mitochondrial targeting sequence (McTs593).

TABLE 3

| | | | NADH | NADPH |
|---|---|---|---|---|
| | | | 3-HPDH | 3-HPDH |
| | | 3HP | activity | activity |
| | | (g/L)/ | (μmol/min/g) | (μmol/min/g) |
| Strain | 3-HPDH gene | OD600 | pH 6.0 | pH 6.0 |
| MeJi412 | Native I. orientalis 3-HPDH | 0.195 | 27.01 | 160.35 |
| McTs244 | Disrupted native I. orientalis 3-HPDH | 0.030 | 18.54 | 42.05 |
| MBin556 | McTs244 expressing I. orientalis 3- | 0.251 | 20.93 | 205.45 |
| | HPDH at adh9091 locus | | | |
| McTs593 | McTs244 expressing C. albicans 3- | 0.211 | 3315.23 | 320.79 |
| | HPDH (w/o amino acids 2-16 of the | | | |
| | MTS) at adh9091 locus | | | |
| McTs812 | McTs244 expressing C. albicans 3- | 0.178 | 936.13 | 140.13 |
| | HPDH (w/o amino acids 2-9 of the | | | |
| | MTS) at adh9091 locus | | | |
| McTs813 | McTs244 expressing C. albicans 3- | 0.165 | 916.87 | 132.33 |
| | HPDH (w/o amino acids 2-9 of the | | | |
| | MTS) at adh9091 locus | | | |
| McTs848 | McTs244 expressing C. albicans 3- | 0.028 | 1750.29 | 229.84 |
| | HPDH (with full MTS) at adh9091 locus | | | |
| McTs849 | McTs244 expressing C. albicans 3- | 0.031 | 1651.87 | 213.82 |
| | HPDH (with full MTS) at adh9091 locus | | | |

[0315] Although the foregoing has been described in some detail by way of illustration and example for the purposes of clarity of understanding, it is apparent to those skilled in the art that any equivalent aspect or modification may be practiced. Therefore, the description and examples should not be construed as limiting the scope of the invention.

1. A recombinant yeast cell, comprising an active 3-HP pathway capable of producing 3-HP and a heterologous polynucleotide encoding a 3-hydroxypropionate dehydrogenase (3-HPDH), wherein the 3-HPDH comprises:
(a) deletion of the N-terminal mitochondrial target sequence (MTS) corresponding to amino acids 2-16 of SEQ ID NO: 197, and
(b) at least 80% sequence identity to amino acids 17-354 of SEQ ID NO: 197.

2. The recombinant cell of claim 1, wherein the heterologous polynucleotide encodes a 3-HPDH having at least 90% sequence identity to amino acids 17-354 of SEQ ID NO: 197.

3. The recombinant cell of claim 1, wherein the heterologous polynucleotide encodes a 3-HPDH that differs by no more than ten amino acids from amino acids 17-354 of SEQ ID NO: 197.

4. The recombinant cell of claim 1, wherein the heterologous polynucleotide encodes a 3-HPDH having an amino acid sequence consisting of SEQ ID NO: 199.

5. The recombinant cell of claim 1, wherein the heterologous polynucleotide comprises a coding sequence having at least 80% sequence identity to nucleotides 49-1062 of SEQ ID NO: 196.

6. The recombinant cell of claim 1, wherein the heterologous polynucleotide has a coding sequence that consists of SEQ ID NO: 198.

7. The recombinant cell of claim 1, wherein the heterologous polynucleotide comprises a coding sequence that hybridizes under at least high stringency conditions with the full-length complementary strand of nucleotides 49-1062 of SEQ ID NO: 196.

8. The recombinant cell of claim 1, wherein the 3-HPDH utilizes an NAD(H) cofactor.

9. The recombinant cell of claim 1, wherein the 3-HPDH has an increased specificity for the cofactor NAD(H) compared to NADP(H).

10. The recombinant cell of claim 1, wherein the active 3-HP pathway proceeds through a malonate semialdehyde intermediate.

11. The recombinant cell of claim 1, wherein the cell produces a greater amount of 3-HP compared to the cell without the heterologous polynucleotide encoding the encoding a 3-hydroxypropionate dehydrogenase (3-HPDH) when cultivated under identical conditions.

12. The recombinant cell of claim 1, wherein the cell comprises a heterologous polynucleotide encoding an aspartate 1-decarboxylase (ADC).

13. The recombinant cell of claim 1, wherein the cell belongs to a genus selected from Issatchenkia, Candida, Kluyveromyces, Pichia, Schizosaccharomyces, Torulaspora, Zygosaccharomyces, and Saccharomyces.

14. The recombinant cell of claim 13, wherein the cell belongs to a clade selected from the I. orientalis/P. fermentans clade and the Saccharomyces clade.

15. The recombinant cell of claim 13, wherein the cell is selected from I. orientalis, C. lambica, and S. bulderi.

16. The recombinant cell of claim 1, wherein the yeast cell is unable to ferment pentose sugars.

17. The recombinant cell of claim 1, wherein said cell further comprises a disruption to one or more endogenous dse2, scw11, eaf3, sed1, or sam2 genes, and/or one or more endogenous genes encoding a PDC, ADH, GALE, CYB2A, CYB2B, GPD, GPP, ALD, or PCK.

18. A method of producing 3-HP, comprising:
(a) cultivating the recombinant yeast cell of claim 1 in a fermentable medium under suitable conditions to produce 3-HP; and
(b) recovering the 3-HP.

19. A method of producing acrylic acid or a salt thereof, comprising:
(a) cultivating the recombinant cell of claim 1 in a fermentable medium under suitable conditions to produce 3-HP;
(b) recovering the 3-HP;
(c) dehydrating the 3-HP under suitable conditions to produce acrylic acid or a salt thereof; and
(d) recovering the acrylic acid or salt thereof.

20. The method of claim 18 wherein the recombinant cell is a CNB1 cell cultivated in a fermentable medium comprising less than 1% pentose sugars.

The application's sequence listing, which the Patent Office published only in electronic form, follows.

SEQUENCE LISTING (209 sequences)

SEQ ID NO: 1 - DNA, 3543 bp, Issatchenkia orientalis
atgtcaactgtggaagatcactcctccctacataaattgagaaaggaatctgagattctttccaatgcaaacaaaatcttagtggctaatagaggtgaaattccaattagaattttcaggtcagcccatgaattgtcaatgcatactgtggcgatctattcccatgaagatcggttgtccatgcataggttgaaggccgacgaggcttatgcaatcggtaagactggtcaatattcgccagttcaagcttatctacaaattgacgaaattatcaaaatagcaaaggaacatgatgtttccatgatccatccaggttatggtttcttatctgaaaactccgaattcgcaaagaaggttgaagaatccggtatgatttgggttgggcctcctgctgaagttattgattctgttggtgacaaggtttctgcaagaaatttggcaattaaatgtgacgttcctgttgttcctggtaccgatggtccaattgaagacattgaacaggctaaacagtttgtggaacaatatggttatcctgtcattataaaggctgcatttggtggtggtggtagaggtatgagagttgttagagaaggtgatgatatagttgatgctttccaaagagcgtcatctgaagcaaagtctgcctttggtaatggtacttgttttattgaaagatttttggataagccaaaacatattgaggttcaattattggctgataattatggtaacacaatccatctctttgaaagagattgttctgttcaaagaagacatcaaaaggttgttgaaattgcacctgccaaaactttacctgttgaagttagaaatgctatattaaaggatgctgtaacgttagctaaaaccgctaactatagaaatgctggtactgcagaatttttagttgattcccaaaacagacattattttattgaaattaatccaagaattcaagttgaacatacaattactgaagaaatcacgggtgttgatattgttgccgctcaaattcaaattgctgcaggtgcatcattggaacaattgggtctattacaaaacaaaattacaactagaggttttgcaattcaatgtagaattacaaccgaggatcctgctaagaattttgccccagatacaggtaaaattgaggtttatagatctgcaggtggtaacggtgtcagattagatggtggtaatgggtttgccggtgctgttatatctcctcattatgactcgatgttggttaaatgttcaacatctggttctaactatgaaattgccagaagaaagatgattagagctttagttgaatttagaatcagaggtgtcaagaccaatattcctttcttattggcattgctaactcatccagttttcatttcgggtgattgttggacaacttttattgatgataccccttcgttattcgaaatggtttcttcaaagaatagagcccaaaaattattggcatatattggtgacttgtgtgtcaatggttcttcaattaaaggtcaaattggtttccctaaattgaacaaggaagcagaaatcccagatttgttggatccaaatgatgaggttattgatgtttctaaaccttctaccaatggtctaagaccgtatctattaaagtatggaccagatgcgttttccaaaaaagttcgtgaattcgatggttgtatgattatggataccacctggagagatgcacatcaatcattattggctacaagagttagaactattgatttactgagaattgctccaacgactagtcatgccttacaaaatgcatttgcattagaatgttggggtggcgcaacatttgatgttgcgatgaggttcctctatgaagatccttgggagagattaagacaacttagaaaggcagttccaaatattcctttccaaatgttattgagaggtgctaatggtgttgcttattcgtcattacctgataatgcaattgatcattttgttaagcaagcaaaggataatggtgttgatattttcagagtctttgatgctttgaacgatttggaacaattgaaggttggtgttgatgctgtcaagaaagccggaggtgttgttgaagctacagtttgttactcaggtgatatgttaattccaggtaaaaagtataacttggattattatttagagactgttggaaagattgtggaaatgggtacccatattttaggtattaaggatatggctggcacgttaaagccaaaggctgctaagttgttgattggctcgatcagatcaaaataccctgacttggttatccatgtccatacccatgactctgctggtaccggtatttcaacttatgttgcatgcgcattggcaggtgccgacattgtcgattgtgcaatcaattcgatgtctggtttaacctctcaaccttcaatgagtgcttttattgctgctttagatggtgatatcgaaactggtgttccagaacattttgcaagacaattagatgcatactgggcagaaatgagattgttatactcatgtttcgaagccgacttgaagggaccagacccagaagtttataaacatgaaattccaggtggacagttgactaacctaatcttccaagcccaacaagttggtttgggtgaacaatgggaagaaactaagaagaagtatgaagatgctaacatgttgttgggtgatattgtcaaggttaccccaacctccaaggttgttggtgatttagcccaatttatggtttctaataaattagaaaaagaagatgttgaaaaacttgctaatgaattagatttcccagattcagttcttgatttctttgaaggattaatgggtacaccatatggtggattcccagagcctttgagaacaaatgtcatttccggcaagagaagaaaattaaagggtagaccaggtttagaattagaacctttcaacctcgaggaaatcagagaaaatttggtttccagatttggtccaggtattactgaatgtgatgttgcatcttataacatgtatccaaaggtttacgagcaatatcgtaaggtggttgaaaaatatggtgatttatctgttttaccaacaaaagcatttttggctcctccaactattggtgaagaagttcatgtggaaattgagcaaggtaagactttgattattaagttattagccatttctgacttgtctaaatctcatggtacaagagaagtatactttgaattgaatggtgaaatgagaaaggttacaattgaagataaaacagctgcaattgagactgttacaagagcaaaggctgacggacacaatccaaatgaagttggtgcgccaatggctggtgtcgttgttgaagttagagtgaagcatggaacagaagttaagaagggtgatccattagccgttttgagtgcaatgaaaatggaaatggttatttctgctcctgttagtggtagggtcggtgaagtttttgtcaacgaaggcgattccgttgatatgggtgatttgcttgtgaaaattgccaaagatgaagcgccagcagcttaa

SEQ ID NO: 2 - protein, 1180 aa, Issatchenkia orientalis
MSTVEDHSSLHKLRKESEILSNANKILVANRGEIPIRIFRSAHELSMHTVAIYSHEDRLSMHRLKADEAYAIGKTGQYSPVQAYLQIDEIIKIAKEHDVSMIHPGYGFLSENSEFAKKVEESGMIWVGPPAEVIDSVGDKVSARNLAIKCDVPVVPGTDGPIEDIEQAKQFVEQYGYPVIIKAAFGGGGRGMRVVREGDDIVDAFQRASSEAKSAFGNGTCFIERFLDKPKHIEVQLLADNYGNTIHLFERDCSVQRRHQKVVEIAPAKTLPVEVRNAILKDAVTLAKTANYRNAGTAEFLVDSQNRHYFIEINPRIQVEHTITEEITGVDIVAAQIQIAAGASLEQLGLLQNKITTRGFAIQCRITTEDPAKNFAPDTGKIEVYRSAGGNGVRLDGGNGFAGAVISPHYDSMLVKCSTSGSNYEIARRKMIRALVEFRIRGVKTNIPFLLALLTHPVFISGDCWTTFIDDTPSLFEMVSSKNRAQKLLAYIGDLCVNGSSIKGQIGFPKLNKEAEIPDLLDPNDEVIDVSKPSTNGLRPYLLKYGPDAFSKKVREFDGCMIMDTTWRDAHQSLLATRVRTIDLLRIAPTTSHALQNAFALECWGGATFDVAMRFLYEDPWERLRQLRKAVPNIPFQMLLRGANGVAYSSLPDNAIDHFVKQAKDNGVDIFRVFDALNDLEQLKVGVDAVKKAGGVVEATVCYSGDMLIPGKKYNLDYYLETVGKIVEMGTHILGIKDMAGTLKPKAAKLLIGSIRSKYPDLVIHVHTHDSAGTGISTYVACALAGADIVDCAINSMSGLTSQPSMSAFIAALDGDIETGVPEHFARQLDAYWAEMRLLYSCFEADLKGPDPEVYKHEIPGGQLTNLIFQAQQVGLGEQWEETKKKYEDANMLLGDIVKVTPTSKVVGDLAQFMVSNKLEKEDVEKLANELDFPDSVLDFFEGLMGTPYGGFPEPLRTNVISGKRRKLKGRPGLELEPFNLEEIRENLVSRFGPGITECDVASYNMYPKVYEQYRKVVEKYGDLSVLPTKAFLAPPTIGEEVHVEIEQGKTLIIKLLAISDLSKSHGTREVYFELNGEMRKVTIEDKTAAIETVTRAKADGHNPNEVGAPMAGVVVEVRVKHGTEVKKGDPLAVLSAMKMEMVISAPVSGRVGEVFVNEGDSVDMGDLLVKIAKDEAPAA

SEQ ID NO: 3 - protein, 1154 aa, Rhodobacter sphaeroides
MAEFRKILIANRGEIAIRVMRAANEMGKKTVAVYAEEDKLSLHRFKADEAYRIGEGLSPVGAYLSIPEIIRVAQMSGADAIHPGYGLLSENPDFVEACDAAGIAFIGPKAETMRALGDKASARRVAMAAGVPVIPATEVLGDDMEEIKRQAAEIGYPLMLKASWGGGGRGMRPITSEAELADKVREGRREAEAAFGNGEGYLEKMIQRARHVEVQILGDKYGAIYHLYERDCTVQRRNQKVVERAPAPYLTEEQRTEICELGRRICAHVNYECAGTVEFLMDMDSEKFYFIEVNPRVQVEHTVTEEVTGIDIVQSQIRIAEGATLAEATGCPSQDDIKLSGHALQCRVTTEDPQNNFIPDYGRLTAYRSATGMGIRLDGGTAYAGGVITRYYDSLLVKVTAWAPTPEKAIARMDRALREFRIRGVATNIAFVENLLKHPSFLDYSYTTKFIDTTPDLFNFKPRRDRATKILTYIADITVNGHPETAGRVRPSAELKDPKAPEPKGAPQPGTRTLLEEKGPQAVADWMAAQTRVLMTDTTMRDGHQSLLATRMRSIDMIKVTPAYAANLGGLFSVECWGGATFDVAYRFLQECPWQRLRDIRARLPNVMTQMLLRASNGVGYTNYPDNVVQEFVRQAAETGVDVFRVFDSLNWVENMRVAMDAVIEANKVCEGTICYTGDLLDPDRSKYDLNYYVGMGRALRDAGAHVLGLKDMAGLLKPAAARVLVKALKEEVGLPIHFHTHDTSGIAGATVLAACDAGVDAVDAAMDAFSGGTSQPCLGSIVEALKHTDRDTGLDIAAIREISDYWGHVRQQYSAFESGLPSPASEVYLHEMPGGQFTNLKAQARSMGLEERWSEVAQAYADANRMFGDIVKVTPSSKVVGDMALMMVAQGLTREEVEDPEVEVSFPDSVVDMLKGNLGQPHGGWPEPILKKVLKGEAPSTERPGAHLPPVDIAAAREKLLSEIKQGDDDPLDTAVDAEDLNGYLMYPKVFTDYRARHRIYGPVRTLPTRTFFYGMEPGEEISAEIDPGKTLEIRLSAVGETSDDGDAKVFFELNGQPRVIRVANRAVKAKTATRPKAQDGNPAHVGAPMPGSVASVAVSAGQKVKPGDLLVTIEAMKMETGLHADRAATVKAVHVGPGAQIEAKDLLVELED

SEQ ID NO: 4 - protein, 1154 aa, Rhizobium etli
MPISKILVANRSEIAIRVFRAANELGIKTVAIWAEEDKLALHRFKADESYQVGRGPHLARDLGPIESYLSIDEVIRVAKLSGADAIHPGYGLLSESPEFVDACNKAGIIFIGPKADTMRQLGNKVAARNLAISVGVPVVPATEPLPDDMAEVAKMAAAIGYPVMLKASWGGGGRGMRVIRSEADLAKEVTEAKREAMAAFGKDEVYLEKLVERARHVESQILGDTHGNVVHLFERDCSVQRRNQKVVERAPAPYLSEAQRQELAAYSLKIAGATNYIGAGTVEYLMDADTGKFYFIEVNPRIQVEHTVTEVVTGIDIVKAQIHILDGAAIGTPQSGVPNQEDIRLNGHALQCRVTTEDPEHNFIPDYGRITAYRSASGFGIRLDGGTSYSGAIITRYYDPLLVKVTAWAPNPLEAISRMDRALREFRIRGVATNLTFLEAIIGHPKFRDNSYTTRFIDTTPELFQQVKRQDRATKLLTYLADVTVNGHPEAKDRPKPLENAARPVVPYANGNGVKDGTKQLLDTLGPKKFGEWMRNEKRVLLTDTTMRDGHQSLLATRMRTYDIARIAGTYSHALPNLLSLECWGGATFDVSMRFLTEDPWERLALIREGAPNLLLQMLLRGANGVGYTNYPDNVVKYFVRQAAKGGIDLFRVFDCLNWVENMRVSMDAIAEENKLCEAAICYTGDILNSARPKYDLKYYTNLAVELEKAGAHIIAVKDMAGLLKPAAAKVLFKALREATGLPIHFHTHDTSGIAAATVLAAVEAGVDAVDAAMDALSGNTSQPCLGSIVEALSGSERDPGLDPAWIRRISFYWEAVRNQYAAFESDLKGPASEVYLHEMPGGQFTNLKEQARSLGLETRWHQVAQAYADANQMFGDIVKVTPSSKVVGDMALMMVSQDLTVADVVSPDREVSFPESVVSMLKGDLGQPPSGWPEALQKKALKGEKPYTVRPGSLLKEADLDAERKVIEKKLEREVSDFEFASYLMYPKVFTDFALASDTYGPVSVLPTPAYFYGLADGEELFADIEKGKTLVIVNQAVSATDSQGMVTVFFELNGQPRRIKVPDRAHGATGAAVRRKAEPGNAAHVGAPMPGVISRVFVSSGQAVNAGDVLVSIEAMKMETAIHAEKDGTIAEVLVKAGDQIDAKDLLAVYGG

SEQ ID NO: 5 - protein, 602 aa, Pseudomonas fluorescens
MTKKIFVTDTILRDAHQSLLATRMRTEDMLPICDKLDKVGYWSLECWGGATFDACVRFLKEDPWERLRQLRAALPNTRLQMLLRGQNLLGYRHYSDDVVKAFVAKAAVNGIDVFRIFDAMNDVRNLRVAIEAVKAAGKHAQGTIAYTTSPVHTIDAFVAQAKQMEAMGCDSVAIKDMAGLLTPYATGELVRALKAEQSLPVFIHSHDTAGLAAMCQLKAIENGADHIDTAISSFASGTSHPGTESMVAALKGTEFDTGLNLELLQEIGLYFYAVRKKYHQFESEFTAVDTRVQVNQVPGGMISNLANQLKEQGALNRMGEVLAEIPRVREDLGFPPLVTPTSQIVGTQAFFNVLAGERYKTITNEVKLYLQGGYGKAPGTVNEKLRRQAIGSEEVIDVRPADLLKPEMTKLRADIGALAKSEEDVLTFAMFPDIGRKFLEERAAGTLTPEVLLPIPEAGKVASAGGEGVPTEFVIDVHGETYRVDITGVGVKAEGKRHFYLSIDGMPEEVVFEPLNEFVGGGSSKRKQASAPGHVSTTMPGNIVDVLVKEGDTVKAGQAVLITEAMKMETEVQAAIAGKVTAIHVAKGDRVNPGEILIEIEG

SEQ ID NO: 6 - protein, 481 aa, Pseudomonas fluorescens
MVPPAQGNLQVITKILIANRGEIAVRIVRACAEMGIRSVAIYSDADRHALHVKRADEAHSIGAEPLAGYLNPRKLVNLAVETGCDALHPGYGFLSENAELADICAERGIKFIGPSAEVIRRMGDKTEARRSMIKAGVPVTPGTEGNVSGIEEALSEGDRIGYPVMLKATSGGGGRGIRRCNSREELEQNFPRVISEATKAFGSAEVFLEKCIVNPKHIEAQILGDSFGNVVHLFERDCSIQRRNQKLIEIAPSPQLTPEQRAYIGDLSVRAAKAVGYENAGTVEFLLAEGEVYFMEMNTRVQVEHTITEEITGIDIVREQIRIASGLPLSVKQEDIQHRGFALQFRINAEDPKNNFLPSFGKITRYYAPGGPGVRTDTAIYTGYTIPPFYDSMCLKLVVWALTWEEAMDRGLRALDDMRLQGVKTTAAYYQEILRNPEFRSGQFNTSFVESHPELTNYSIKRKPEELALAIAAAIAAHAGL

SEQ ID NO: 7 - protein, 1140 aa, Corynebacterium glutamicum
MSTHTSSTLPAFKKILVANRGEIAVRAFRAALETGAATVAIYPREDRGSFHRSFASEAVRIGTEGSPVKAYLDIDEIIGAAKKVKADAIYPGYGFLSENAQLARECAENGITFIGPTPEVLDLTGDKSRAVTAAKKAGLPVLAESTPSKNIDEIVKSAEGQTYPIFVKAVAGGGGRGMRFVASPDELRKLATEASREAEAAFGDGAVYVERAVINPQHIEVQILGDHTGEVVHLYERDCSLQRRHQKVVEIAPAQHLDPELRDRICADAVKFCRSIGYQGAGTVEFLVDEKGNHVFIEMNPRIQVEHTVTEEVTEVDLVKAQMRLAAGATLKELGLTQDKIKTHGAALQCRITTEDPNNGFRPDTGTITAYRSPGGAGVRLDGAAQLGGEITAHFDSMLVKMTCRGSDFETAVARAQRALAEFTVSGVATNIGFLRALLREEDFTSKRIATGFIADHPHLLQAPPADDEQGRILDYLADVTVNKPHGVRPKDVAAPIDKLPNIKDLPLPRGSRDRLKQLGPAAFARDLREQDALAVTDTTFRDAHQSLLATRVRSFALKPAAEAVAKLTPELLSVEAWGGATYDVAMRFLFEDPWDRLDELREAMPNVNIQMLLRGRNTVGYTPYPDSVCRAFVKEAASSGVDIFRIFDALNDVSQMRPAIDAVLETNTAVAEVAMAYSGDLSDPNEKLYTLDYYLKMAEEIVKSGAHILAIKDMAGLLRPAAVTKLVTALRREFDLPVHVHTHDTAGGQLATYFAAAQAGADAVDGASAPLSGTTSQPSLSAIVAAFAHTRRDTGLSLEAVSDLEPYWEAVRGLYLPFESGTPGPTGRVYRHEIPGGQLSNLRAQATALGLADRFELIEDNYAAVNEMLGRPTKVTPSSKVVGDLALHLVGAGVDPADFAADPQKYDIPDSVIAFLRGELGNPPGGWPEPLRTRALEGRSEGKAPLTEVPEEEQAHLDADDSKERRNSLNRLLFPKPTEEFLEHRRRFGNTSALDDREFFYGLVEGRETLIRLPDVRTPLLVRLDAISEPDDKGMRNVVANVNGQIRPMRVRDRSVESVTATAEKADSSNKGHVAAPFAGVVTVTVAEGDEVKAGDAVAIIEAMKMEATITASVDGKIDRVVVPAATKVEGGDLIVVVS

SEQ ID NO: 8 - protein, 1152 aa, Sinorhizobium meliloti
MSISKILVANRSEIAIRVFRAANELGLKTVAIWAEEDKLALHRFKADESYQVGRGPHLPRDLGPIMSYLSIDEVIRVAKLSGADAIHPGYGLLSESPEFAEACAANGITFIGPKPETMRQLGNKVAARNLAISIGVPVVPATEPLPDDPEEIKRLAEEIGYPVMLKASWGGGGRGMRAIRDPKDLIREVTEAKREAKAAFGKDEVYLEKLVERARHVESQILGDTHGNVVHLFERDCSIQRRNQKVVERAPAPYLNDAQRQELADYSLKIARATNYIGAGTVEYLMDSDTGKFYFIEVNPRIQVEHTVTEVVTGIDIVKAQIHILDGFAIGAPESGVPRQEDIRLNGHALQCRITTEDPEQNFIPDYGRITAYRGATGFGIRLDGGTAYSGAVITRYYDPLLEKVTAWAPNPGEAIQRMIRALREFRIRGVATNLTFLEAIISHPKFHDNSYTTRFIDTTPELFQQVKRQDRATKLLTYLADVTVNGHPEVKGRPKPSDDIAAPVVPFTGGDVKPGTKQRLDQLGPKKFAEWVKAQPEVLITDTTMRDGHQSLLATRMRTYDIARIAGTYARALPNLFSLECWGGATFDVSMRFLTEDPWERLAMVREGAPNLLLQMLLRGANGVGYKNYPDNVVKYFVRQAAKGGIDVFRVFDCLNWVENMRVAMDAVAEEDRICEAAICYTGDILNSARPKYDLKYYTALAAELEKAGAHMIAVKDMAGLLKPAAARVLFKALKEATGLPIHFHTHDTSGIAAATVLAAVESGVDVVDAAMDALSGNTSQPCLGSIVEALSGSERDPGLDPEWIRRISFYWEAVRHQYAAFESDLKGPASEVYLHEMPGGQFTNLKEQARSLGLETRWHEVAQAYADANRMFGDIVKVTPSSKVVGDMALMMVSQDLTVADVENPGKDIAFPESVVSMLKGDLGQPPGGWPEALQKKALKGEEPYDARPGSLLEDADLDAERKGIEEKLGREVTDFEFASYLMYPKVFTDYAVACETYGPVSVLPTPAYFYGMAPGEELFADIEKGKTLVILNQAQGEIDEKGMVKMFFEMNGQPRSIKVPDRNRGASAAVRRKAEAGNAAHLGAPMPGVISTVAVASGQSVKAGDVLLSIEAMKMETALHAEKDGVISEVLVRAGDQIDAKDLLVVFGG

SEQ ID NO: 9 - DNA, 2652 bp, Escherichia coli
atgaacgaacaatattccgcattgcgtagtaatgtcagtatgctcggcaaagtgctgggagaaaccatcaaggatgcgttgggagaacacattcttgaacgcgtagaaactatccgtaagttgtcgaaatcttcacgcgctggcaatgatgctaaccgccaggagttgctcaccaccttacaaaatttgtcgaacgacgagctgctgcccgttgcgcgtgcgtttagtcagttcctgaacctggccaacaccgccgagcaataccacagcatttcgccgaaaggcgaagctgccagcaacccggaagtgatcgcccgcaccctgcgtaaactgaaaaaccagccggaactgagcgaagacaccatcaaaaaagcagtggaatcgctgtcgctggaactggtcctcacggctcacccaaccgaaattacccgtcgtacactgatccacaaaatggtggaagtgaacgcctgtttaaaacagctcgataacaaagatatcgctgactacgaacacaaccagctgatgcgtcgcctgcgccagttgatcgcccagtcatggcataccgatgaaatccgtaagctgcgtccaagcccggtagatgaagccaaatggggctttgccgtagtggaaaacagcctgtggcaaggcgtaccaaattacctgcgcgaactgaacgaacaactggaagagaacctcggctacaaactgcccgtcgaatttgttccggtccgttttacttcgtggatgggcggcgaccgcgacggcaacccgaacgtcactgccgatatcacccgccacgtcctgctactcagccgctggaaagccaccgatttgttcctgaaagatattcaggtgctggtttctgaactgtcgatggttgaagcgacccctgaactgctggcgctggttggcgaagaaggtgccgcagaaccgtatcgctatctgatgaaaaacctgcgttctcgcctgatggcgacacaggcatggctggaagcgcgcctgaaaggcgaagaactgccaaaaccagaaggcctgctgacacaaaacgaagaactgtgggaaccgctctacgcttgctaccagtcacttcaggcgtgtggcatgggtattatcgccaacggcgatctgctcgacaccctgcgccgcgtgaaatgtttcggcgtaccgctggtccgtattgatatccgtcaggagagcacgcgtcataccgaagcgctgggcgagctgacccgctacctcggtatcggcgactacgaaagctggtcagaggccgacaaacaggcgttcctgatccgcgaactgaactccaaacgtccgcttctgccgcgcaactggcaaccaagcgccgaaacgcgcgaagtgctcgatacctgccaggtgattgccgaagcaccgcaaggctccattgccgcctacgtgatctcgatggcgaaaacgccgtccgacgtactggctgtccacctgctgctgaaagaagcgggtatcgggtttgcgatgccggttgctccgctgtttgaaaccctcgatgatctgaacaacgccaacgatgtcatgacccagctgctcaatattgactggtatcgtggcctgattcagggcaaacagatggtgatgattggctattccgactcagcaaaagatgcgggagtgatggcagcttcctgggcgcaatatcaggcacaggatgcattaatcaaaacctgcgaaaaagcgggtattgagctgacgttgttccacggtcgcggcggttccattggtcgcggcggcgcacctgctcatgcggcgctgctgtcacaaccgccaggaagcctgaaaggcggcctgcgcgtaaccgaacagggcgagatgatccgctttaaatatggtctgccagaaatcaccgtcagcagcctgtcgctttataccggggcgattctggaagccaacctgctgccaccgccggagccgaaagagagctggcgtcgcattatggatgaactgtcagtcatctcctgcgatgtctaccgcggctacgtacgtgaaaacaaagattttgtgccttacttccgctccgctacgccggaacaagaactgggcaaactgccgttgggttcacgtccggcgaaacgtcgcccaaccggcggcgtcgagtcactacgcgccattccgtggatcttcgcctggacgcaaaaccgtctgatgctccccgcctggctgggtgcaggtacggcgctgcaaaaagtggtcgaagacggcaaacagagcgagctggaggctatgtgccgcgattggccattcttctcgacgcgtctcggcatgctggagatggtcttcgccaaagcagacctgtggctggcggaatactatgaccaacgcctggtagacaaagcactgtggccgttaggtaaagagttacgcaacctgcaagaagaagacatcaaagtggtgctggcgattgccaacgattcccatctgatggccgatctgccgtggattgcagagtctattcagctacggaatatttacaccgacccgctgaacgtattgcaggccgagttgctgcaccgctcccgccaggcagaaaaagaaggccaggaaccggatcctcgcgtcgaacaagcgttaatggtcactattgccgggattgcggcaggtatgcgtaataccggctaa

SEQ ID NO: 10 - protein, 883 aa, Escherichia coli
MNEQYSALRSNVSMLGKVLGETIKDALGEHILERVETIRKLSKSSRAGNDANRQELLTTLQNLSNDELLPVARAFSQFLNLANTAEQYHSISPKGEAASNPEVIARTLRKLKNQPELSEDTIKKAVESLSLELVLTAHPTEITRRTLIHKMVEVNACLKQLDNKDIADYEHNQLMRRLRQLIAQSWHTDEIRKLRPSPVDEAKWGFAVVENSLWQGVPNYLRELNEQLEENLGYKLPVEFVPVRFTSWMGGDRDGNPNVTADITRHVLLLSRWKATDLFLKDIQVLVSELSMVEATPELLALVGEEGAAEPYRYLMKNLRSRLMATQAWLEARLKGEELPKPEGLLTQNEELWEPLYACYQSLQACGMGIIANGDLLDTLRRVKCFGVPLVRIDIRQESTRHTEALGELTRYLGIGDYESWSEADKQAFLIRELNSKRPLLPRNWQPSAETREVLDTCQVIAEAPQGSIAAYVISMAKTPSDVLAVHLLLKEAGIGFAMPVAPLFETLDDLNNANDVMTQLLNIDWYRGLIQGKQMVMIGYSDSAKDAGVMAASWAQYQAQDALIKTCEKAGIELTLFHGRGGSIGRGGAPAHAALLSQPPGSLKGGLRVTEQGEMIRFKYGLPEITVSSLSLYTGAILEANLLPPPEPKESWRRIMDELSVISCDVYRGYVRENKDFVPYFRSATPEQELGKLPLGSRPAKRRPTGGVESLRAIPWIFAWTQNRLMLPAWLGAGTALQKVVEDGKQSELEAMCRDWPFFSTRLGMLEMVFAKADLWLAEYYDQRLVDKALWPLGKELRNLQEEDIKVVLAIANDSHLMADLPWIAESIQLRNIYTDPLNVLQAELLHRSRQAEKEGQEPDPRVEQALMVTIAGIAAGMRNTG

SEQ ID NO: 11 - protein, 483 aa, Methanobacterium thermoautotrophicum
MKVPRCMSTQHPDNVNPPFFAEEPELGGEDEIREAYYVFSHLGCDEQMWDCEGKEVDNYVVKKLLTKYQAFFRDHVLGEDLRLTLRVPNPTVERAEAKILLETLESIPRSYDTASLFYGMDAAPVFEVILPMTSSSSCLNRIHSYYLDFVKGKERLQLADGVTVKEWIGEFRPDEINVIPLFEDHEGMLNAAKITGEYLDGKDIQEQRVFLARSDPAMNYGMISATLLNRIALSDFRDLEEESGVKLYPIIGMGSAPFRGNLRPDNVEDVTWEYRGAYTFTVQSSFKYDHEPSDVIRGIKKLRSVKPGRAAEIERESVLEIISAYCREYRRQVMDLVDIINRVARYVPGRRKRKLHIGLFGYSRSMGNVSLPRAITFTAALYSLGVPPELLGFNALSSGDLEFIEEVYPGLGRDLHDAARYANPESPFLSPEVKSSFEEYLEPEYDEGHMKTTEEIIRALRINRTANLQELILEAASQRKFLG

SEQ ID NO: 12 - protein, 537 aa, Clostridium perfringens
MKIPCSMMTQHPDNVETYISIQQEPAEAIKGLTPQDKGGLGIEEVMIDFEGKLTPYHQTSQIALGLISNGIIPGKDVRVTPRIPNANKESVFRQLMSIMSIIETNVQSKELTGTPAISEVVVPMIETGKEISEFQDRVNSVVDMGNKNYKTKLDLNSVRIIPLVEDVPALANIDRILDEHYEIEKSKGHILKDLRIMIARSDTAMSYGLISGVLSVLMAVDGAYKWGEKHGVTISPILGCGSLPFRGHFSEENIDEILATYSGIKTFTFQSALRYDHGEEATKHAVRELKEKIAQSKPRNFSEEDKDLMKEFIGICSKHYLQTFLKVIDTVSFVSDFIPKNRDRLTKAKTGLEYNREVANLDNVADLVKDEVLKQEILSIDNSKEYAVPRAISFTGAMYTLGMPPELMGMGRALNEIKTKYGQEGIDKLLEIYPILRKDLAFAARFANGGVSKKIIDEEARQEYKEDMKYVNEILNLGLDYDFLNENEFYHTLLKTTKPIIMHLMGLEENVMRNSTEELKILNEWIVRMGKVRGSIG

SEQ ID NO: 13 - DNA, 1260 bp, Issatchenkia orientalis
atgtccagaggcttctttactgagaacattacgcaattgccaccagaccctttgtttggtcttaaggccaggttcagcaatgactcacgtgaaaacaaggtcgatttaggtattggggcatatagggacgacaacggtaagccatggatcttaccatctgtcaggttggccgaaaacttgattcagaactccccagactacaaccatgagtacctaccaatcggtggacttgctgatttcacttctgctgcggcaagagttgtatttggaggcgattctaaagccatttcgcaaaaccgtcttgtctccatccagagtttgtcaggtacaggtgccttacatgttgctggtctatttatcaagcgccaatacaagtctcttgatggcacttccgaagaccctctaatatatctatcggaacctacatgggccaaccacgttcaaatctttgaagttattggtctcaagcctgtattctatccatattggcatgccgcaagcaagaccttggatctgaagggctacttaaaggcaataaacgatgctccagaagggtcggtttttgtattgcatgcaacggctcataaccctactggtttggatccaacacaagaacaatggatggagattttggccgctataagtgccaaaaagcatctgccattatttgattgtgcatatcagggtttcacctccgggtctctagatagagatgcttgggctgttcgagaagctgtcaacaatgacaagtacgaattcccgggaattattgtctgtcaatcgtttgcgaaaaatgttggcatgtatggtgaacggattggtgcagttcatattgttctacctgaatcagacgcttccctaaacagcgccatcttctcccaattgcaaaagacaatcagatcggagatttccaatccaccaggatacggtgcaaagattgtgtctaaagttttgaacactccggaactttacaaacagtgggagcaagatttgatcaccatgtcttcgagaatcactgcaatgagaaaggagctagtaaatgagctcgagcgtcttggaacccctggcacttggagacacatcaccgagcaacagggtatgttttcctttactggtttgaacccggagcaggttgccaagctagagaaggagcatggtgtttatcttgttcgtagtggacgtgcaagtattgcaggcctcaacatgggaaacgtcaagtatgttgccaaggccattgactctgtcgtgagagacctttag

SEQ ID NO: 14 - protein, 419 aa, Issatchenkia orientalis
MSRGFFTENITQLPPDPLFGLKARFSNDSRENKVDLGIGAYRDDNGKPWILPSVRLAENLIQNSPDYNHEYLPIGGLADFTSAAARVVFGGDSKAISQNRLVSIQSLSGTGALHVAGLFIKRQYKSLDGTSEDPLIYLSEPTWANHVQIFEVIGLKPVFYPYWHAASKTLDLKGYLKAINDAPEGSVFVLHATAHNPTGLDPTQEQWMEILAAISAKKHLPLFDCAYQGFTSGSLDRDAWAVREAVNNDKYEFPGIIVCQSFAKNVGMYGERIGAVHIVLPESDASLNSAIFSQLQKTIRSEISNPPGYGAKIVSKVLNTPELYKQWEQDLITMSSRITAMRKELVNELERLGTPGTWRHITEQQGMFSFTGLNPEQVAKLEKEHGVYLVRSGRASIAGLNMGNVKYVAKAIDSVVRDL

SEQ ID NO: 15 - protein, 418 aa, Saccharomyces cerevisiae
MSATLFNNIELLPPDALFGIKQRYGQDQRATKVDLGIGAYRDDNGKPWVLPSVKAAEKLIHNDSSYNHEYLGITGLPSLTSNAAKIIFGTQSDAFQEDRVISVQSLSGTGALHISAKFFSKFFPDKLVYLSKPTWANHMAIFENQGLKTATYPYWANETKSLDLNGFLNAIQKAPEGSIFVLHSCAHNPTGLDPTSEQWVQIVDAIASKNHIALFDTAYQGFATGDLDKDAYAVRLGVEKLSTVSPVFVCQSFAKNAGMYGERVGCFHLALTKQAQNKTIKPAVTSQLAKIIRSEVSNPPAYGAKIVAKLLETPELTEQWHKDMVTMSSRITKMRHALRDHLVKLGTPGNWDHIVNQCGMFSFTGLTPQMVKRLEETHAVYLVASGRASIAGLNQGNVEYVAKAIDEVVRFYTIEAKL

SEQ ID NO: 16 - protein, 396 aa, Escherichia coli
MFENITAAPADPILGLADLFRADERPGKINLGIGVYKDETGKTPVLTSVKKAEQYLLENETTKNYLGIDGIPEFGRCTQELLFGKGSALINDKRARTAQTPGGTGALRVAADFLAKNTSVKRVWVSNPSWPNHKSVFNSAGLEVREYAYYDAENHTLDFDALINSLNEAQAGDVVLFHGCCHNPTGIDPTLEQWQTLAQLSVEKGWLPLFDFAYQGFARGLEEDAEGLRAFAAMHKELIVASSYSKNFGLYNERVGACTLVAADSETVDRAFSQMKAAIRANYSNPPAHGASVVATILSNDALRAIWEQELTDMRQRIQRMRQLFVNTLQEKGANRDFSFIIKQNGMFSFSGLTKEQVLRLREEFGVYAVASGRVNVAGMTPDNMAPLCEAIVAVL

SEQ ID NO: 17 - protein, 139 aa, Streptomyces avermitilis
MLRTMFKSKIHRATVTQADLHYVGSVTIDADLLDAADLLPGELVHIVDITNGARLETYVIEGERGSGVVGINGAAAHLVHPGDLVIIISYAQVSDAEARALRPRVVHVDRDNRVVALGADPAEPVPGSDQARSPQAVTA

SEQ ID NO: 18 - protein, 127 aa, Clostridium acetobutylicum
MHLNMLKSKIHRATVVQADLNYVGSITIDRNLMDKANILEYEKVEIANINNGARFETYVIAGEAGSGIICLNGAAARCAQAGDKVIIMCYCSLTPEEASEHRPKVVFVNDDNSISNVTEYEKHGTIG

SEQ ID NO: 19 - DNA, 1404 bp, Issatchenkia orientalis
atgtctattagtgaaaaatattttcctcaagaacctcaatctcctgaattgaaaactgcaattccaggtcctcaatcaaaggcaaagctcgaggaattatctgctgtctatgatacaaaggctgcatattttgttaccgactactacaaatctcttggtaactatattgtggatgcagatggcaacaagctactagattcttattgccaaatctcttctatcgcattgggttacaataatccagcattattaaaagtagcacattctgatgaaatgacagttgctttatgtaacagacctgctttggcatgttttccatccactgattactatgaaatactaaagaagggattgttgtccgttgctccaaagggattagataaggtttgtactgcacacacgggatctgatgccaatgaaatggcatttaaggctgcatttttgtttcaagcaagtaagaagagaggtgacaaaccatttaccagcgaagagctggaatctgtcatggagaacaagttgccaggcacctctgacatggttatcctgtcatttgaaaaagggttccatggtagattgtttggatctttatctaccactagatctaaagctattcacaaactggatattcctgcgtttgaatggccaaaggctccattccctcagttaaagtatcctctggatcaattccaagctgaaaacaaagcagaagaagaaagatgtttgaaggctttagaggaaattattgtcaactctcctgccaaaattgcagctgcaatcattgaaccggtccaatctgaaggtggtgataatcatgcttcaccagaattcttccaaggtattagagaaatcaccaaaaagcacggtgtcattcttattgttgatgaagttcaaacaggaggtggtgcttctggtaagatgtggttacatgaacactatggcattgtcccagacatcatgactttttctaaaaaaatgcaaaatgcaggtttctttttcagtgaagcaggtcttgctggggaccaaccattcagacaattcaatacctggtgcggtgatccatcaaaagctctaattgcaagaaccataattgaagaaattaaagataagaacctattgactagtgttaccgaaacaggtgactacctatattcaaagctcgaagcaatttcagcaaagtatgacaaaatgatcaacttgagaggtaagggaagaggtttctttattgcatttgatgccccaacaccggagttaagaaacaaatttattgctgaatgtaagaaattaggtttaaacattggtggatgcggtgaacaaggtgttagattgagacctgcattagtttttgaaaagaagcatgctgatatcttagcctccattattgatcaagctttttccaaaatttaa

SEQ ID NO: 20 - protein, 467 aa, Issatchenkia orientalis
MSISEKYFPQEPQSPELKTAIPGPQSKAKLEELSAVYDTKAAYFVTDYYKSLGNYIVDADGNKLLDSYCQISSIALGYNNPALLKVAHSDEMTVALCNRPALACFPSTDYYEILKKGLLSVAPKGLDKVCTAHTGSDANEMAFKAAFLFQASKKRGDKPFTSEELESVMENKLPGTSDMVILSFEKGFHGRLFGSLSTTRSKAIHKLDIPAFEWPKAPFPQLKYPLDQFQAENKAEEERCLKALEEIIVNSPAKIAAAIIEPVQSEGGDNHASPEFFQGIREITKKHGVILIVDEVQTGGGASGKMWLHEHYGIVPDIMTFSKKMQNAGFFFSEAGLAGDQPFRQFNTWCGDPSKALIARTIIEEIKDKNLLTSVTETGDYLYSKLEAISAKYDKMINLRGKGRGFFIAFDAPTPELRNKFIAECKKLGLNIGGCGEQGVRLRPALVFEKKHADILASIIDQAFSKI

SEQ ID NO: 21 - protein, 475 aa, Saccharomyces kluyveri
MPSYSVAELYYPDEPTEPKISTSSYPGPKAKQELEKLSNVFDTRAAYLLADYYKSRGNYIVDQDGNVLLDVYAQISSIALGYNNPEILKVAKSDAMSVALANRPALACFPSNDYGQLLEDGLLKAAPQGQDKIWTALSGSDANETAFKACFMYQAAKKRNGRSFSTEELESVMDNQLPGTSEMVICSFEKGFHGRLFGSLSTTRSKPIHKLDIPAFNWPKAPFPDLKYPLEENKEANKAEESSCIEKFSQIVQEWQGKIAAVIIEPIQSEGGDNHASSDFFQKLREITIENGILMIVDEVQTGVGATGKMWAHEHWNLSNPPDLVTFSKKFQAAGFYYHDPKLQPDQPFRQFNTWCGDPSKALIAKVIYEEIVKHDLVTRTAEVGNYLFNRLEKLFEGKNYIQNLRGKGQGTYIAFDFGTSSERDSFLSRLRCNGANVAGCGDSAVRLRPSLTFEEKHADVLVSIFDKTLRQLYG

SEQ ID NO: 22 - protein, 451 aa, Streptomyces avermitilis
MTPQPNPQVGAAVKAADRAHVFHSWSAQELIDPLAVAGAEGSYFWDYDGRRYLDFTSGLVFTNIGYQHPKVVAAIQEQAASLTTFAPAFAVEARSEAARLIAERTPGDLDKIFFTNGGADAIEHAVRMARIHTGRPKVLSAYRSYHGGTQQAVNITGDPRRWASDSASAGVVHFWAPYLYRSRFYAETEQQECERALEHLETTIAFEGPGTIAAIVLETVPGTAGIMVPPPGYLAGVRELCDKYGIVFVLDEVMAGFGRTGEWFAADLFDVTPDLMTFAKGVNSGYVPLGGVAISGKIAETFGKRAYPGGLTYSGHPLACAAAVATINVMAEEGVVENAANLGARVIEPGLRELAERHPSVGEVRGVGMFWALELVKDRETREPLVPYNAAGEANAPMAAFGAAAKANGLWPFINMNRTHVVPPCNVTEAEAKEGLAALDAALSVADEYTV

SEQ ID NO: 23 - protein, 419 aa, Streptomyces avermitilis
MSALSPHLRQATPVVAVRGEGVHLYGEDGRRYLDFTAGIGVTSTGHCHPRVVAAAQEQAGTLVHGQYTTVLHPPLRRLVDRLGEVLPAGLDSLFFTNSGSEAVEAALRLARQATGRPNVLVCHGGFHGRTVAAAAMTTSGTRFRSGFSPLMSGVVVTPFPTAFRYGWDEETATRFALQELDYTLRTISSPDDTAAIIVEPVLGEGGYVPATRAFLEGLRERADRHGFVLILDEVQTGVGRTGRFWGHDHFGVTPDILITAKGLASGFPLSGIAASAELMGKAWPGSQGGTYGANAVACAAACATLDVVRDEKLVDNAEAMGARLRAGLAAVAATTPAIGDVRGLGLMLASEFVTEDGGPDPETAARVQRAAVDEGLLLLLCGAWNQVVRMIPALVIDEAEVDEGLRAWSAAVEVGVPAR

SEQ ID NO: 24 - protein, 471 aa, Saccharomyces cerevisiae
MSICEQYYPEEPTKPTVKTESIPGPESQKQLKELGEVFDTRPAYFLADYEKSLGNYITDVDGNTYLDLYAQISSIALGYNNPALIKAAQSPEMIRALVDRPALGNFPSKDLDKILKQILKSAPKGQDHVWSGLSGADANELAFKAAFIYYRAKQRGYDADFSEKENLSVMDNDAPGAPHLAVLSFKRAFHGRLFASGSTTCSKPIHKLDFPAFHWPHAEYPSYQYPLDENSDANRKEDDHCLAIVEELIKTWSIPVAALIIEPIQSEGGDNHASKYFLQKLRDITLKYNVVYIIDEVQTGVGATGKLWCHEYADIQPPVDLVTFSKKFQSAGYFFHDPKFIPNKPYRQFNTWCGEPARMIIAGAIGQEISDKKLTEQCSRVGDYLFKKLEGLQKKYPENFQNLRGKGRGTFIAWDLPTGEKRDLLLKKLKLNGCNVGGCAVHAVRLRPSLTFEEKHADIFIEALAKSVNEL

SEQ ID NO: 25 - DNA, 813 bp, Issatchenkia orientalis
atgtttggtaatatttcccaaagacttgcaggcaagaacatcctaattacaggtgcgtccactggtatcggataccatacagcaaagtattttgcagaagctgcaaatggagacttgaagttggttttggctgcaagaagaaaggagaagctggaggcactaaaggcagacttgcttgccaagtatccatccatcaaagtccatattgagagtttggatgtctccaaaacggaaaccattgcacctttcttaaaaggtttacctgaggaattttcaattgtcgacgtgttggtcaacaatgcaggtaaggcgcttggtttggatccaattggctctgtcgatccaaaggacgtggatgaaatgttccagaccaatgttttgggtatgattcaattgacccagttggttgtacagcaaatgaaggagagaaactccggggacattgtccaactaggttcagtggctggtagaaacccatacccaggtggtggtatctactgtgcctccaaggccgcattgagatcttttacacatgtattgagagaggaattgattaataccaagattagagtgattgaaatcgagcctggaaatgttgcaactgaggaattttctttgaccagattcaaaggtgataagtccaaggccgaaaaggtctatgagggaaccgagccattgtatggtaccgatattgcagaattgattctatttgcagtttctagacctcaaaacactgttattgcagaaacacttgtttttgctagtaaccaagcttctgcttaccatattttcagaggatcattagataaatag

SEQ ID NO: 26 - protein, 270 aa, Issatchenkia orientalis
MFGNISQRLAGKNILITGASTGIGYHTAKYFAEAANGDLKLVLAARRKEKLEALKADLLAKYPSIKVHIESLDVSKTETIAPFLKGLPEEFSIVDVLVNNAGKALGLDPIGSVDPKDVDEMFQTNVLGMIQLTQLVVQQMKERNSGDIVQLGSVAGRNPYPGGGIYCASKAALRSFTHVLREELINTKIRVIEIEPGNVATEEFSLTRFKGDKSKAEKVYEGTEPLYGTDIAELILFAVSRPQNTVIAETLVFASNQASAYHIFRGSLDK

SEQ ID NO: 27 - protein, 248 aa, Escherichia coli
MIVLVTGATAGFGECITRRFIQQGHKVIATGRRQERLQELKDELGDNLYIAQLDVRNRAAIEEMLASLPAEWCNIDILVNNAGLALGMEPAHKASVEDWETMIDTNNKGLVYMTRAVLPGMVERNHGHIINIGSTAGSWPYAGGNVYGATKAFVRQFSLNLRTDLHGTAVRVTDIEPGLVGGTEFSNVRFKGDDGKAEKTYQNTVALTPEDVSEAVWWVSTLPAHVNINTLEMMPVTQSYAGLNVHRQ

SEQ ID NO: 28 - protein, 298 aa, Alcaligenes faecalis
MSNTIAFIGLGHMGKPMALNLLKAGHSLNVFDLNAQAMQELQAAGAQVGESAVQIAQDAQMVFTMLPAGRHVRQVYEGENGLLQTVAPGTVLVDCSTIDAQTSQDLAAKASKLGLFMLDAPVSGGTGGAIAGTLTFMVGGEDQALEKARPYLDAMGKNIFHAGKAGAGQVAKICNNMLLGILMAGTAEALALGVAHGLDPAVLSTIMARSSGRNWATELYNPWPGVMPDVPASRDYQGGFATGLMLKDLGLAADAAVSQNSATPLGELARNLFALHAAQGQNAGLDFSSILNLYRQKH

SEQ ID NO: 29 - protein, 314 aa, Metallosphaera sedula
MTEKVSVVGAGVIGVGWATLFASKGYSVSLYTEKKETLDKGIEKLRNYVQVMKNNSQITEDVNTVISRVSPTTNLDEAVRGANFVIEAVIEDYDAKKKIFGYLDSVLDKEVILASSTSGLLITEVQKAMSKHPERAVIAHPWNPPHLLPLVEIVPGEKTSMEVVERTKSLMEKLDRIVVVLKKEIPGFIGNRLAFALFREAVYLVDEGVATVEDIDKVMTAAIGLRWAFMGPFLTYHLGGGEGGLEYFFNRGFGYGANEWMHTLAKYDKFPYTGVTKAIQQMKEYSFIKGKTFQEISKWRDEKLLKVYKLVWEK

SEQ ID NO: 30 - protein, 295 aa, Pseudomonas putida
MRIAFIGLGNMGAPMARNLIKAGHQLNLFDLNKAVLAELAELGGQISPSPKDAAANSELVITMLPAAAHVRSVYLNEDGVLAGIRPGTPTVDCSTIDPQTARDVSKAAAAKGVDMGDAPVSGGTGGAAAGTLTFMVGASTELFASLKPVLEQMGRNIVHCGEVGTGQIAKICNNLLLGISMIGVSEAMALGNALGIDTKVLAGIINSSTGRCWSSDTYNPWPGIIETAPASRGYTGGFGAELMLKDLGLATEAARQAHQPVILGAVAQQLYQAMSLRGEGGKDFSAIVEGYRKKD

SEQ ID NO: 31 - protein, 295 aa, Pseudomonas putida
MRIAFIGLGNMGAPMARNLIKAGHQLNLFDLNKTVLAELAELGGQISPSPKDAAASSELVITMLPAAAHVRSVYLNDDGVLAGIRPGTPTVDCSTIDPQTARDVSKAAAAKGVDMGDAPVSGGTGGAAAGTLTFMVGASAELFASLKPVLEQMGRNIVHCGEVGTGQIAKICNNLLLGISMIGVSEAMALGNALGIDTKVLAGIINSSTGRCWSSDTYNPWPGIIETAPASRGYTGGFGAELMLKDLGLATEAARQAHQPVILGAVAQQLYQAMSLRGEGGKDFSAIVEGYRKKD

SEQ ID NO: 32 - protein, 298 aa, Pseudomonas aeruginosa
MTDIAFLGLGNMGGPMAANLLKAGHRVNVFDLQPKAVLGLVEQGAQGADSALQCCEGAEVVISMLPAGQHVESLYLGDDGLLARVAGKPLLIDCSTIAPETARKVAEAAAAKGLTLLDAPVSGGVGGARAGTLSFIVGGPAEGFARARPVLENMGRNIFHAGDHGAGQVAKICNNMLLGILMAGTAEALALGVKNGLDPAVLSEVMKQSSGGNWALNLYNPWPGVMPQAPASNGYAGGFQVRLMNKDLGLALANAQAVQASTPLGALARNLFSLHAQADAEHEGLDFSSIQKLYRGKD

SEQ ID NO: 33 - protein, 382 aa, Ralstonia eutropha
MAFIYYLTHIHLDFGAVSLLKSECERIGIRRPLLVTDKGVVAAGVAQRAIDAMQGLQVAVFDETPSNPTEAMVRKAAAQYREAGCDGLVAVGGGSSIDLAKGIAILATHEGELTTYATIEGGSARITDKAAPLIAVPTTSGTGSEVARGAIIILDDGRKLGFHSWHLLPKSAVCDPELTLGLPAGLTAATGMDAIAHCIETFLAPAFNPPADGIALDGLERGWGHIERATRDGQDRDARLNMMSASMQGAMAFQKGLGCVHSLSHPLGGLKIDGRTGLHHGTLNAVVMPAVLRFNADAPTVVRDDRYARLRRAMHLPDGADIAQAVHDMTVRLGLPTGLRQMGVTEDMFDKVIAGALVDHCHKTNPKEASAADYRRMLEQSM

SEQ ID NO: 34 - protein, 371 aa, Clostridium kluyveri
MKLLKLAPDVYKFDTAEEFMKYFKVGKGDFILTNEFLYKPFLEKFNDGADAVFQEKYGLGEPSDEMINNIIKDIGDKQYNRIIAVGGGSVIDIAKILSLKYTDDSLDLFEGKVPLVKNKELIIVPTTCGTGSEVTNVSVAELKRRHTKKGIASDELYATYAVLVPEFIKGLPYKFFVTSSVDALIHATEAYVSPNANPYTDMFSVKAMELILNGYMQMVEKGNDYRVEIIEDFVIGSNYAGIAFGNAGVGAVHALSYPIGGNYHVPHGEANYLFFTEIFKTYYEKNPNGKIKDVNKLLAGILKCDESEAYDSLSQLLDKLLSRKPLREYGMKEEEIETFADSVIEGQQRLLVNNYEPFSREDIVNTYKKLY

SEQ ID NO: 35 - protein, 538 aa, Mannheimia succiniciproducens
MTDLNQLTQELGALGIHDVQEVVYNPSYELLFAEETKPGLEGYEKGTVTNQGAVAVNTGIFTGRSPKDKYIVLDDKTKDTVWWTSEKVKNDNKPMSQDTWNSLKGLVADQLSGKRLFVVDAFCGANKDTRLAVRVVTEVAWQAHFVTNMFIRPSAEELKGFKPDFVVMNGAKCTNPNWKEQGLNSENFVAFNITEGVQLIGGTWYGGEMKKGMFSMMNYFLPLRGIASMHCSANVGKDGDTAIFFGLSGTGKTTLSTDPKRQLIGDDEHGWDDEGVFNFEGGCYAKTINLSAENEPDIYGAIKRDALLENVVVLDNGDVDYADGSKTENTRVSYPIYHIQNIVKPVSKAGPATKVIFLSADAFGVLPPVSKLTPEQTKYYFLSGFTAKLAGTERGITEPTPTFSACFGAAFLSLHPTQYAEVLVKRMQESGAEAYLVNTGWNGTGKRISIKDTRGIIDAILDGSIDKAEMGSLPIFDFSIPKALPGVNPAILDPRDTYADKAQWEEKAQDLAGRFVKNFEKYTGTAEGQALVAAGPKA

SEQ ID NO: 36 - protein, 532 aa, Anaerobiospirillum succiniciproducens
MSLSESLAKYGITGATNIVHNPSHEELFAAETQASLEGFEKGTVTEMGAVNVMTGVYTGRSPKDKFIVKNEASKEIWWTSDEFKNDNKPVTEEAWAQLKALAGKELSNKPLYVVDLFCGANENTRLKIRFVMEVAWQAHFVTNMFIRPTEEELKGFEPDFVVLNASKAKVENFKELGLNSETAVVFNLAEKMQIILNTWYGGEMKKGMFSMMNFYLPLQGIAAMHCSANTDLEGKNTAIFFGLSGTGKTTLSTDPKRLLIGDDEHGWDDDGVFNFEGGCYAKVINLSKENEPDIWGAIKRNALLENVTVDANGKVDFADKSVTENTRVSYPIFHIKNIVKPVSKAPAAKRVIFLSADAFGVLPPVSILSKEQTKYYFLSGFTAKLAGTERGITEPTPTFSSCFGAAFLTLPPTKYAEVLVKRMEASGAKAYLVNTGWNGTGKRISIKDTRGIIDAILDGSIDTANTATIPYFNFTVPTELKGVDTKILDPRNTYADASEWEVKAKDLAERFQKNFKKFESLGGDLVKAGPQL

SEQ ID NO: 37 - protein, 538 aa, Actinobacillus succinogenes
MTDLNKLVKELNDLGLTDVKEIVYNPSYEQLFEEETKPGLEGFDKGTLTTLGAVAVDTGIFTGRSPKDKYIVCDETTKDTVWWNSEAAKNDNKPMTQETWKSLRELVAKQLSGKRLFVVEGYCGASEKHRIGVRMVTEVAWQAHFVKNMFIRPTDEELKNFKADFTVLNGAKCTNPNWKEQGLNSENFVAFNITEGIQLIGGTWYGGEMKKGMFSMMNYFLPLKGVASMHCSANVGKDGDVAIFFGLSGTGKTTLSTDPKRQLIGDDEHGWDESGVFNFEGGCYAKTINLSQENEPDIYGAIRRDALLENVVVRADGSVDFDDGSKTENTRVSYPIYHIDNIVRPVSKAGHATKVIFLTADAFGVLPPVSKLTPEQTEYYFLSGFTAKLAGTERGVTEPTPTFSACFGAAFLSLHPIQYADVLVERMKASGAEAYLVNTGWNGTGKRISIKDTRGIIDAILDGSIEKAEMGELPIFNLAIPKALPGVDPAILDPRDTYADKAQWQVKAEDLANRFVKNFVKYTANPEAAKLVGAGPKA

SEQ ID NO: 38 - protein, 618 aa, Ralstonia eutropha
MNHPSMQGTTALNVPAWVRNQKLVAWVAEIAALTKPERIHWCDGSQEEYDRLCEQMVAAGTLKRLNPAKRKNSYLALSDPSDVARVEDRTFICSQKKEDAGPTNNWVAPAEMRTTLNGLFDGCMRGRTLYVVPFSMGPLGSPIAHIGVELSDSPYVAVNMRIMTRMGKAVYDVLGTDGDFVPCVHTVGKPLAAGEKDVPWPCNPTKYIVHFPESREIWSFGSGYGGNALLGKKCFALRIASTMGRDEGWLAEHMLILGVTSPEGKKFHVAAAFPSACGKTNFAMLIPPKGFEGWKVTTIGDDIAWIKPGKDGRLYAINPEAGYFGVAPGTSEKTNFNAMATLKENVIFTNVALTDDGDVWWEGMTKEAPAHLTDWQGKDWTPEIAKATGAKAAHPNARFTAPASQCPSIDENWDNPAGVPIDAFIFGGRRSTTVPLVTEARNWTEGVYMAATMGSETTAAAAGQQGVVRRDPFAMLPFCGYNMSDYFGHWLALGQKLEAAGAKLPKIYCVNWFRKDADGNFVWPGFGENMRVLSWMIDRVEGKGEGAEHVFGTSPRYEDLNWSGVEFSVAQFTQVTSIDADAWKQELALHDELFTQLKHNLPQALAEARAALGKRLEG

SEQ ID NO: 39 - protein, 540 aa, Escherichia coli
MRVNNGLTPQELEAYGISDVHDIVYNPSYDLLYQEELDPSLTGYERGVLTNLGAVAVDTGIFTGRSPKDKYIVRDDTTRDTFWWADKGKGKNDNKPLSPETWQHLKGLVTRQLSGKRLFVVDAFCGANPDTRLSVRFITEVAWQAHFVKNMFIRPSDEELAGFKPDFIVMNGAKCTNPQWKEQGLNSENFVAFNLTERMQLIGGTWYGGEMKKGMFSMMNYLLPLKGIASMHCSANVGEKGDVAVFFGLSGTGKTTLSTDPKRRLIGDDEHGWDDDGVFNFEGGCYAKTIKLSKEAEPEIYNAIRRDALLENVTVREDGTIDFDDGSKTENTRVSYPIYHIDNIVKPVSKAGHATKVIFLTADAFGVLPPVSRLTADQTQYHFLSGFTAKLAGTERGITEPTPTFSACFGAAFLSLHPTQYAEVLVKRMQAAGAQAYLVNTGWNGTGKRISIKDTRAIIDAILNGSLDNAETFTLPMFNLAIPTELPGVDTKILDPRNTYASPEQWQEKAETLAKLFIDNFDKYTDTPAGAALVAAGPKL

SEQ ID NO: 40 - protein, 236 aa, Lactococcus lactis
MSEITQLFQYNTLGALMAGLYEGTMTIGELLKHGDLGIGTLDSIDGELIVLDGKAYQAKGDKTIVELTDDIKVPYAAVVPHQAEVVFKQKFTVSDKELEDRIESYFDGQNLFRSIKITGKFPKMHVRMIPRAKSGTKFVEVSQNQPEYTEENIKGTIVGIWTPEMFHGVSVAGYHLHFISEDFTFGGHVLDFIIDNGTVEIGAIDQLNQSFPVQDRKFLFADLDIEALKKDIDVAE

SEQ ID NO: 41 - protein, 239 aa, Streptococcus thermophilus
MSEAIKLFQYNTLGALMAGLYGGTLTVGELLEHGDLGLGTLDSIDGELIVLDGKAYQAKGSEGKVEVVEVSPDEKVPYAAVVPHQAEVIFRQRYEMTDKELEDRIESYYDGVNLFRSIKIKGHFKHMHVRMIPKSNADIKFADVATRQPEYEVDDISGTIVGIWTPEMFHGVSVAGYHLHFISDDLTFGGHVMDFVIENGIIEVGPVDQLDQRFPVQDRQYLFAKFNVDEMRKDITKAE

SEQ ID NO: 42 - protein, 285 aa, Brevibacillus brevis
MKKNIITSITSLALVAGLSLTAFAATTATVPAPPAKQESKPAVAANPAPKNVLFQYSTINALMLGQFEGDLTLKDLKLRGDMGLGTINDLDGEMIQMGTKFYQIDSTGKLSELPESVKTPFAVTTHFEPKEKTTLTNVQDYNQLTKMLEEKFENKNVFYAVKLTGTFKMVKARTVPKQTRPYPQLTEVTKKQSEFEFKNVKGTLIGFYTPNYAAALNVPGFHLHFITEDKTSGGHVLNLQFDNANLEISPIHEFDVQLPHTDDFAHSDLTQVTTSQVHQAESERK

SEQ ID NO: 43 - protein, 259 aa, Enterobacter aerogenes
MMMHSSACDCEASLCETLRGFSAQHPDSVIYQTSLMSALLSGVYVGETTIADLLAHGDFGLGTFNELDGEMIAFSSQVYQLRADGSARAAKPEQKTPFAVMTWFQPQYRKTFNGPVSRQQIHDVIDQQIPSDNLFCVRIDGNFRHAHTRTVPRQTPPYRAMTDVLDDQPVFRFNQREGVLVGFRTPQHMQGINVAGYHEHFITDDRQGGGHLLDYQLESGVLTFGEIHKLMIDLPADSAFLQANLHPSNLDAAIRAVEN

SEQ ID NO: 44 - protein, 1231 aa, Mycobacterium tuberculosis
MANISSPFGQNEWLVEEMYRKFRDDPSSVDPSWHEFLVDYSPEPTSQPAAEPTRVTSPLVAERAAAAAPQAPPKPADTAAAGNGVVAALAAKTAVPPPAEGDEVAVLRGAAAAVVKNMSASLEVPTATSVRAVPAKLLIDNRIVINNQLKRTRGGKISFTHLLGYALVQAVKKFPNMNRHYTEVDGKPTAVTPAHTNLGLAIDLQGKDGKRSLVVAGIKRCETMRFAQFVTAYEDIVRRARDGKLTTEDFAGVTISLTNPGTIGTVHSVPRLMPGQGAIIGVGAMEYPAEFQGASEERIAELGIGKLITLTSTYDHRIIQGAESGDFLRTIHELLLSDGFWDEVFRELSIPYLPVRWSTDNPDSIVDKNARVMNLIAAYRNRGHLMADTDPLRLDKARFRSHPDLEVLTHGLTLWDLDRVFKVDGFAGAQYKKLRDVLGLLRDAYCRHIGVEYAHILDPEQKEWLEQRVETKHVKPTVAQQKYILSKLNAAEAFETFLQTKYVGQKRFSLEGAESVIPMMDAAIDQCAEHGLDEVVIGMPHRGRLNVLANIVGKPYSQIFTEFEGNLNPSQAHGSGDVKYHLGATGLYLQMFGDNDIQVSLTANPSHLEAVDPVLEGLVRAKQDLLDHGSIDSDGQRAFSVVPLMLHGDAAFAGQGVVAETLNLANLPGYRVGGTIHIIVNNQIGFTTAPEYSRSSEYCTDVAKMIGAPIFHVNGDDPEACVWVARLAVDFRQRFKKDVVIDMLCYRRRGHNEGDDPSMTNPYVYDVVDTKRGARKSYTEALIGRGDISMKEAEDALRDYQGQLERVFNEVRELEKHGVQPSESVESDQMIPAGLATAVDKSLLARIGDAFLALPNGFTAHPRVQPVLEKRREMAYEGKIDWAFGELLALGSLVAEGKLVRLSGQDSRRGTFSQRHSVLIDRHTGEEFTPLQLLATNSDGSPTGGKFLVYDSPLSEYAAVGFEYGYTVGNPDAVVLWEAQFGDFVNGAQSIIDEFISSGEAKWGQLSNVVLLLPHGHEGQGPDHTSARIERFLQLWAEGSMTIAMPSTPSNYFHLLRRHALDGIQRPLIVFTPKSMLRHKAAVSEIKDFTEIKFRSVLEEPTYEDGIGDRNKVSRILLTSGKLYYELAARKAKDNRNDLAIVRLEQLAPLPRRRLRETLDRYENVKEFFWVQEEPANQGAWPRFGLELPELLPDKLAGIKRISRRAMSAPSSGSSKVHAVEQQEILDEAFG

SEQ ID NO: 45 - protein, 985 aa, Bradyrhizobium japonicum
MSRQDANAAFALSSFLQGTNATYIDEIYARYEKDPSSVDAEWQEFFKSLKDQPDDVRRNAEGPSWERANWPLTPQDDLTSALDGNWAEVEKAVGGKIAAKAQAKGADISSADLLQATRDSVRALMLIRSYRMRGHFHAKLDPLGIEAPRNREELDPRTYGFSEADFDRKIFLDHVLGLEYGTLREITAICERTYCQTLGVEFMHISNAAQKAWIQERIEGPDKEISFTREGRRAILTKLVEAEGFEKFCDTKFTGTKRFGLDGAESLIPALEQIIKRGGNLGVKEIVLGMPHRGRLNVLTQVMGKAHRALFHEFKGGSANPDAVEGSGDVKYHLGASSDREFDGNRIHLSLTANPSHLEIVDPVVLGKVRAKQDQHGDPPDMRISVMPLLMHGDAAFAGQGVVAECFGLSDLKGYRTGGSVHFIVNNQIGFTTYPRYSRSSPYPSDVAKMIDAPIFHVNGDDPEAVVFAAKVATEFRQKFHKPVVIDMFCYRRHGHNEGDEPAFTQPVMYKKIAAHPSTLELYARRLISEGVMTEGEVDKAKADWRARLDAEFEAGTSYKPNKADWLDGKWAGFKIADQEEDARRGVTGVDITALKDIGRKITKVPDGFRVHRTIQRFLENRSKAIDSGAGIDWATGEALAFCSLLNENHHVRLSGQDSERGTFSQRHSVLIDQEDESRYTPFNHLGHEQGHYEVINSLLSEEAVLGFEYGYSLAEPNTLTLWEAQFGDFANGAQVVFDQFISSGERKWLRMSGLVCLLPHGYEGQGPEHSSARLERYLQMCAEDNMQVVYPTTPANYFHVLRRQLHREIRKPLILMTPKSLLRHKRAVSRLEELAKGTTFHRILYDDAQMLPTDAIKLVPDEKIRRIVLCSGKVYYDLYEEREKRGIDDIYLMRVEQLYPVPLKALVAELSRFKKAEVVWCQEEPRNMGAWHFIEPYLEWVLNQVNGVSRRPRYVGRAASAATATGLMSKHQAQLKAFLDEALS

SEQ ID NO: 46 - protein, 995 aa, Rhizobium loti
MARQDQTNDQFSLTSFLYGGNADYIDALYAAYEDDPASVNPEWQEFFAGLKDDAGDVRRNAKGASWAKPSWPLQANGELVSALDGNWGIVEKHLEKKVKDKAVTNGVVLSDADVHQATRDSVRAIMMIRAYRMRGHLHANLDPLGIAKPLEDYNELSPENYGFTAADYDRPIFLDNVLGLEFGTIRQMLEILTRTYCSTLGVEFMHISDPEEKAWIQARIEGADKEISFTNTGKKAILQKLVEAEGFEQFIDVKYKGTKRFGLDGGEALIPALEQIVKRGGQLGMKEIVLGMAHRGRLNVLSQVMAKPHRAIFHEFKGGSAAPDEVEGSGDVKYHLGASSDREFDGNKVHLSLTANPSHLEIVDPVVMGKARAKQDYLFGRGREEIVPLEERAKVLPLLLHGDAAFAGQGVIAEILGLSGLRGHRVAGTLHFIINNQIGFTTNPRFSRSSPYPSDVAKMIEAPIFHVNGDDPEAVVHATKVAIEFRMKFHKPVVVDMFCYRRFGHNEGDEPAFTQPIMYRNIRTHKTTVQIYADRLIAEGHITQAELDQMKADWRAHLESEWEVGQHYKPNKADWLDGAWSGLRTADNQDEQRRGKTAVPVKTLKEIGKKLTEVPKGFEAHKTIIRFLENRREAIESGEGIDWSTAEALAFGAILLDGNPIRLSGQDSERGTFSQRHSVLYDQRDETRYIPLNNLSAAQAGYEVINSMLSEEAVLGFEYGYSLAEPKALTLWEAQFGDFANGAQVVFDQFISSGERKWLRMSGLVCLLPHGYEGQGPEHSSARLERFLQLCAEDNMQVANCTTPANYFHILRRQLKRDFRKPLILMTPKSLLRHKRAVSTLPEISGESSFHRLLWDDAQLLPNQPIKLTKDSKIRRVVLCSGKVYYDLYEEREKRGINDIYLLRVEQLYPFPAKALITELSRFRNAEMVWCQEEPKNMGAWSFIDPYLEWVLAHIDAKHQRVRYTGRPAAASPATGLMSKHLAQLAALLEDALGE

SEQ ID NO: 47 - protein, 547 aa, Lactococcus lactis
MYTVGDYLLDRLHELGIEEIFGVPGDYNLQFLDQIISREDMKWIGNANELNASYMADGYARTKKAAAFLTTFGVGELSAINGLAGSYAENLPVVEIVGSPTSKVQNDGKFVHHTLADGDFKHFMKMHEPVTAARTLLTAENATYEIDRVLSQLLKERKPVYINLPVDVAAAKAEKPALSLEKESSTTNTTEQVILSKIEESLKNAQKPVVIAGHEVISFGLEKTVTQFVSETKLPITTLNFGKSAVDESLPSFLGIYNGKLSEISLKNFVESADFILMLGVKLTDSSTGAFTHHLDENKMISLNIDEGIIFNKVVEDFDFRAVVSSLSELKGIEYEGQYIDKQYEEFIPSSAPLSQDRLWQAVESLTQSNETIVAEQGTSFFGASTIFLKSNSRFIGQPLWGSIGYTFPAALGSQIADKESRHLLFIGDGSLQLTVQELGLSIREKLNPICFIINNDGYTVEREIHGPTQSYNDIPMWNYSKLPETFGATEDRVVSKIVRTENEFVSVMKEAQADVNRMYWIELVLEKEDAPKLLKKMGKLFAEQNK

SEQ ID NO: 48 - DNA, 1728 bp, Issatchenkia orientalis
atgactgacaaaatctccctaggtacttatctgtttgaaaagttaaaggaagcaggctcttattccatctttggtgttcctggtgatttcaatttggcattgttggaccacgtcaaggaagttgaaggcattagatgggtcggtaacgctaacgagttgaatgccggctacgaagctgatggttatgcaagaatcaatggatttgcatccctaatcaccacctttggtgtcggtgaattgtctgccgtcaatgccattgcaggttcttatgctgaacacgtcccattgatccatattgttggtatgccttccttgtctgctatgaagaacaacttgttgttacaccataccttgggtgacacaagattcgacaacttcaccgaaatgtcaaagaaaatcagtgcaaaggttgaaattgtttacgatttggaatcagctccaaaattaattaataacttgattgaaaccgcttatcacacaaagagaccagtctacttgggacttccttccaactttgctgatgaattggttccagcggcattagttaaggaaaacaagttacatttagaagaacctctaaacaaccccgttgctgaagaagaattcattcataacgttgttgaaatggtcaagaaggcagaaaaaccaatcattctcgttgacgcttgtgctgcaagacataacatttctaaggaagtgagagagttggctaaattgactaaattccctgtcttcaccaccccaatgggtaaatctactgttgatgaagatgatgaagaattctttggcttatacttgggttctctatctgctccagatgttaaggacattgttggcccaaccgattgtatcttatccttaggtggtttaccttctgatttcaacaccggttccttctcatatggttacaccactaagaatgtcgttgaattccattccaactactgtaaattcaaatctgcaacttatgaaaacttgatgatgaagggcgcagtccaaagattgatcagcgaattgaagaatattaagtattccaatgtctcaactttatctccaccaaaatctaaatttgcttacgaatctgcaaaggttgctccagaaggtatcatcactcaagattacctgtggaagagattatcttacttcttaaagccaagagatatcattgtcactgaaactggtacttcctcctttggtgtcttggctacccacttaccaagagattcaaagtctatctcccaagtcttatggggttccattggtttctccttaccagctgcagttggtgctgcatttgctgctgaagatgcacacaaacaaactggcgaacaagaaagaagaactgttttgtttattggtgatggttctttacaattgactgtccaatcaatctcagatgctgcaagatggaacatcaagccatacatcttcatcttaaacaacagaggttacactatcgaaaagttgatccacggtcgtcatgaggactacaaccaaattcaaccatgggatcaccaattgttattgaagctctttgctgacaagacccaatatgaaaaccatgttgttaaatccgctaaggacttggacgctttgatgaaggatgaagcattcaacaaggaagataagattagagtcattgaattattcttggatgaattcgatgctccagaaatcttggttgctcaagctaaattatctgatgaaatcaactctaaagccgcttaa

SEQ ID NO: 49 - protein, 575 aa, Issatchenkia orientalis
MTDKISLGTYLFEKLKEAGSYSIFGVPGDFNLALLDHVKEVEGIRWVGNANELNAGYEADGYARINGFASLITTFGVGELSAVNAIAGSYAEHVPLIHIVGMPSLSAMKNNLLLHHTLGDTRFDNFTEMSKKISAKVEIVYDLESAPKLINNLIETAYHTKRPVYLGLPSNFADELVPAALVKENKLHLEEPLNNPVAEEEFIHNVVEMVKKAEKPIILVDACAARHNISKEVRELAKLTKFPVFTTPMGKSTVDEDDEEFFGLYLGSLSAPDVKDIVGPTDCILSLGGLPSDFNTGSFSYGYTTKNVVEFHSNYCKFKSATYENLMMKGAVQRLISELKNIKYSNVSTLSPPKSKFAYESAKVAPEGIITQDYLWKRLSYFLKPRDIIVTETGTSSFGVLATHLPRDSKSISQVLWGSIGFSLPAAVGAAFAAEDAHKQTGEQERRTVLFIGDGSLQLTVQSISDAARWNIKPYIFILNNRGYTIEKLIHGRHEDYNQIQPWDHQLLLKLFADKTQYENHVVKSAKDLDALMKDEAFNKEDKIRVIELFLDEFDAPEILVAQAKLSDEINSKAA

SEQ ID NO: 50 - protein, 563 aa, Saccharomyces cerevisiae
MSEITLGKYLFERLKQVNVNTVFGLPGDFNLSLLDKIYEVEGMRWAGNANELNAAYAADGYARIKGMSCIITTFGVGELSALNGIAGSYAEHVGVLHVVGVPSISAQAKQLLLHHTLGNGDFTVFHRMSANISETTAMITDIATAPAEIDRCIRTTYVTQRPVYLGLPANLVDLNVPAKLLQTPIDMSLKPNDAESEKEVIDTILALVKDAKNPVILADACCSRHDVKAETKKLIDLTQFPAFVTPMGKGSIDEQHPRYGGVYVGTLSKPEVKEAVESADLILSVGALLSDFNTGSFSYSYKTKNIVEFHSDHMKIRNATFPGVQMKFVLQKLLTTIADAAKGYKPVAVPARTPANAAVPASTPLKQEWMWNQLGNFLQEGDVVIAETGTSAFGINQTTFPNNTYGISQVLWGSIGFTTGATLGAAFAAEEIDPKKRVILFIGDGSLQLTVQEISTMIRWGLKPYLFVLNNDGYTIEKLIHGPKAQYNEIQGWDHLSLLPTFGAKDYETHRVATTGEWDKLTQDKSFNDNSKIRMIEIMLPVFDAPQNLVEQAKLTAATNAKQ

SEQ ID NO: 51 - protein, 563 aa, Kluyveromyces lactis
MSEITLGRYLFERLKQVEVQTIFGLPGDFNLSLLDNIYEVPGMRWAGNANELNAAYAADGYARLKGMSCIITTFGVGELSALNGIAGSYAEHVGVLHVVGVPSVSSQAKQLLLHHTLGNGDFTVFHRMSSNISETTAMITDINTAPAEIDRCIRTTYVSQRPVYLGLPANLVDLTVPASLLDTPIDLSLKPNDPEAEEEVIENVLQLIKEAKNPVILADACCSRHDAKAETKKLIDLTQFPAFVTPMGKGSIDEKHPRFGGVYVGTLSSPAVKEAVESADLVLSVGALLSDFNTGSFSYSYKTKNIVEFHSDYTKIRSATFPGVQMKFALQKLLTKVADAAKGYKPVPVPSEPEHNEAVADSTPLKQEWVWTQVGEFLREGDVVITETGTSAFGINQTHFPNNTYGISQVLWGSIGFTTGATLGAAFAAEEIDPKKRVILFIGDGSLQLTVQEISTMIRWGLKPYLFVLNNDGYTIERLIHGETAQYNCIQNWQHLELLPTFGAKDYEAVRVSTTGEWNKLTTDEKFQDNTRIRLIEVMLPTMDAPSNLVKQAQLTAATNAKN

SEQ ID NO: 52 - protein, 568 aa, Zymomonas mobilis
MSYTVGTYLAERLVQIGLKHHFAVAGDYNLVLLDNLLLNKNMEQVYCCNELNCGFSAEGYARAKGAAAAVVTYSVGALSAFDAIGGAYAENLPVILISGAPNNNDHAAGHVLHHALGKTDYHYQLEMAKNITAAAEAIYTPEEAPAKIDHVIKTALREKKPVYLEIACNIASMPCAAPGPASALFNDEASDEASLNAAVEETLKFIANRDKVAVLVGSKLRAAGAEEAAVKFADALGGAVATMAAAKSFFPEENPHYIGTSWGEVSYPGVEKTMKEADAVIALAPVFNDYSTTGWTDIPDPKKLVLAEPRSVVVNGIRFPSVHLKDYLTRLAQKVSKKTGALDFFKSLNAGELKKAAPADPSAPLVNAEIARQVEALLTPNTTVIAETGDSWFNAQRMKLPNGARVEYEMQWGHIGWSVPAAFGYAVGAPERRNILMVGDGSFQLTAQEVAQMVRLKLPVIIFLINNYGYTIEVMIHDGPYNNIKNWDYAGLMEVFNGNGGYDSGAGKGLKAKTGGELAEAIKVALANTDGPTLIECFIGREDCTEELVKWGKRVAAANSRKPVNKLL

SEQ ID NO: 53 - protein, 557 aa, Acetobacter pasteurianus
MTYTVGMYLAERLVQIGLKHHFAVGGDYNLVLLDQLLLNKDMKQIYCCNELNCGFSAEGYARSNGAAAAVVTFSVGAISAMNALGGAYAENLPVILISGAPNSNDQGTGHILHHTIGKTDYSYQLEMARQVTCAAESITDAHSAPAKIDHVIRTALRERKPAYLDIACNIASEPCVRPGPVSSLLSEPEIDHTSLKAAVDATVALLKNRPAPVMLLGSKLRAANALAATETLADKLQCAVTIMAAAKGFFPEDHAGFRGLYWGEVSNPGVQELVETSDALLCIAPVFNDYSTVGWSGMPKGPNVILAEPDRVTVDGRAYDGFTLRAFLQALAEKAPARPASAQKSSVPTCSLTATSDEAGLTNDEIVRHINALLTSNTTLVAETGDSWFNAMRMTLAGARVELEMQWGHIGWSVPSAFGNAMGSQDRQHVVMVGDGSFQLTAQEVAQMVRYELPVIIFLINNRGYVIEIAIHDGPYNYIKNWDYAGLMEVFNAGEGHGLGLKATTPKELTEAIARAKANTRGPTLIECQIDRTDCTDMLVQWGRKVASTNARKTTLA

SEQ ID NO: 54 - protein, 528 aa, Pseudomonas putida [sequence omitted]

SEQ ID NO: 55 - protein, 528 aa, Pseudomonas aeruginosa
MKTVHSASYEILRRHGLTTVFGNPGSNELPFLKDFPEDFRYILGLHEGAVVGMADGFALASGRPAFVNLHAAAGTGNGMGALTNAWYSHSPLVITAGQQVRSMIGVEAMLANVDAGQLPKPLVKWSHEPACAQDVPRALSQAIQTASLPPRAPVYLSIPYDDWAQPAPAGVEHLAARQVSGAALPAPALLAELGERLSRSRNPVLVLGPDVDGANANGLAVELAEKLRMPAWVAPSASRCPFPTRHACFRGVLPAAIAGISRLLDGHDLILVVGAPVFRYHQFAPGDYLPAGAELVQVTCDPGEAARAPMGDALVGDIALTLEALLEQVRPSARPLPEALPRPPALAEEGGPLRPETVFDVIDALAPRDAIFVKESTSTVTAFWQRVEMREPGSYFFPAAGGLGFGLPAAVGAQLAQPRRQVIGIIGDGSANYGITALWSAAQYRVPAVFIILKNGTYGALRWFAGVLEVPDAPGLDVPGLDFCAIARGYGVEALHAATREELEGALKHALAADRPVLIEVPTQTIEP

SEQ ID NO: 56 - protein, 526 aa, Pseudomonas stutzeri
MASVHSITYELLRRQGIDTVFGNPGSNELPFLKDFPEDFRYILALQEACVVGIADGYAQASRKPAFINLHSAAGTGNAMGAMSNAWNCHSPLIVTAGQQNRAMIGVEALLTNVDAASLPRPLVKWSYEPASAAEVPHAMSRAIHMASMAPRGPVYLSVPYDDWDKEADPQSHHLYDRSVNSAVRLNDQDLEVLVEALNSASNPAIVLGPDVDSANANADCVTLAERLKAPVWVAPSAPRCPFPTRHPCFRGLMPAGIAAISQLLEGHDVVLVIGAPVFRYHQYDPGQYLKPGTRLISITCDPLEAARAPMGDAIVADIGTMTAALASRIGESERQLPAVLPSPERVNQDAGRLRPETVFDTLNEMAPEDAIYLNESTSTTAQMWQRLNMRNPGSYYFCAAGGLGFALPAAIGVQLAEPDRQVIAVIGDGSANYSISALWTAAHYNIPAIFLIMNNGTYGALRWFAGVLEAENVPGLDVPGIDFCAIAKGYGIPALKADNLEQLKGSIHEALSAKGPVLIEVSTVSL

SEQ ID NO: 57 - protein, 528 aa, Pseudomonas fluorescens
MKTVHSASYDILRQQGLTTVFGNPGSNELPFLKGFPEDFRYILGLHEGAVVGMADGFALASGQPAFVNLHAAAGTGNGMGALTNAWYSHSPLVITAGQQVRSMIGVEAMLANVDAPQLPKPLVKWSAEPACAEDVPRALSQAIHMANQAPKGPVYLSIPYDDWARPAPAGVEHLARRQVATAGLPSAAQLRSLVQRLAAARNPVLVLGPDVDGSRSNHLAVQLAEKLRMPAWVAPSASRCPFPTRHPSFRGVLPAAIAGISRCLADHDLILVVGAPVFRYHQFAPGDYLPAGTELLHITCDPGEAARAPMGDALVGDIVETLQALVWALPDCDRPQPQALPPAAPVEELGGLLRPETVFDVIDELAPKDAIYVKESTSTVGAFWQRVEMREPGSYYFPAAGGLGFGLPAAVGVQLARPERRVIGVIGDGSANYGITALWTAAQYQIPVVFIILKNGTYGALRWFAGVLQVSDAPGLDVPGLDFCAIGRGYGVHSVQANTREAFAQALSEALAGDRPVLIEVPTLTIEP

SEQ ID NO: 58 - protein, 1220 aa, Chloroflexus aurantiacus
MATGESMSGTGRLAGKIALITGGAGNIGSELTRRFLAEGATVIISGRNRAKLTALAEMQAEAGVPAKRIDLEVMDGSDPVAVRAGIEAIVARHGQIDILVNNAGSAGAQRRLAEIPLTEAELGPGAEETLHASIANLLGMGWHLMRIAAPHMPVGSAVINVSTIFSRAEYYGRIPYVTPKAALNALSQLAARELGARGIRVNTIFPGPIESDRIRTVFQRMDQLKGRPEGDTAHHFLNTMRLCRANDQGALERRFPSVGDVADAAVFLASAESAALSGETIEVTHGMELPACSETSLLARTDLRTIDASGRTTLICAGDQIEEVMALTGMLRTCGSEVIIGFRSAAALAQFEQAVNESRRLAGADFTPPIALPLDPRDPATIDAVFDWAGENTGGIHWILPATSHEPAPCVIEVDDERVLNFLADEITGTIVIASRLARYWQSQRLTPGARARGPRVIFLSNGADQNGNVYGRIQSAAIGQLIRVWRHEAELDYQRASAAGDHVLPPVWANQIVRFANRSLEGLEFACAWTAQLLHSQRHINEITLNIPANISATTGARSASVGWAESLIGLHLGKVALITGGSAGIGGQIGRLLALSGARVMLAARDRHKLEQMQAMIQSELAEVGYTDVEDRVHIAPGCDVSSEAQLADLVERTLSAFGTVDYLINNAGIAGVEEMVIDMPVEGWRHTLFANLISNYSLMRKLAPLMKKQGSGYILNVSSYFGGEKDAAIPYPNRADYAVSKAGQRAMAEVFARFLGPEIQINAIAPGPVEGDRLRGTGERPGLFARRARLILENKRLNELHAALIAAARTDERSMHELVELLLPNDVAALEQNPAAPTALRELARRFRSEGDPAASSSSALLNRSIAAKLLARLHNGGYVLPADIFANLPNPPDPFFTRAQIDREARKVRDGIMGMLYLQRMPTEFDVAMATVYYLADRNVSGETFHPSGGLRYERTPTGGELFGLPSPERLAELVGSTVYLIGEHLTEHLNLLAMYLERYGARQVWIVETETGAETMRRLLHDHVEAGRLMTIVAGDQIEAAIDQAITRYGRPGPVVCTPFRPLPTVPLVGRKDSDWSTVLSEAEFAELCEHQLTHHFRVARKIALSDGASLALVTPETTATSTTEQFALANFIKTTLHAFTATIGVESERTAQRILINQVDLTRRARAEEPRDPHERQQELERFIEAVLLVTAPLPPEADTRYAGRIHRGRAITV

SEQ ID NO: 59 - protein, 1229 aa, Roseiflexus castenholzii
MSTVRRLEGKVALITGGAGNIGEVITRRFLAEGATVVITGRNAEKLAVYRRRLIDEERVAPERVVALRMDGSDIAQVRAGVAQIVHGGTDVPIPLHRIDILVNNAGSAGPRRRLVDIPLEPSEVQPPDSETLAQAVGNLVGITWNLTRAAAPHMPSGSSVINISTIFSRTDYYGRIAYVAPKAALNALSDGLARELGVRGIRVNTIYPGPIESERIYTMFQAMDALKGQPEGDTASGFLRMMRLSRIDQNGEVVKRFPSPVDVANTAVFLASDESAAFTGHAFEVTHGMEVPTESRTTFVSRPGLRSVDATGKVILICAGDQVDDAVALADTLRSCRATVVIGFRDPRALEKASVLLREPRHALAADMYGRPTMTAEARLVRLDPLDPRAAAQTLEQIHAELGAIHHAVVLPGQSRHAPSASLIEVDDQVVERFLHQELVGTIALARELARFWEEYPSGSSMHRVLFVSNPDDQQGNQYSHILRAAVEQLVRVWRHESEYDSVNPAHQQEGQSSAAVWANQLIRYVNNEMANLDFTCAWVAKLLGSDRRIAEINLYLPEEIVGTIGVHNPGFGWAESLFGLHMGKVALITGGSAGIGGQIGRLLALSGAHVMLAARNADQLEQMRASIVREVRDASYPDAESRVAIFPGSDVSDIDGLERLVNHTVRVFGKVDYLINNAGIAGAEEMVIDMPVDAWRHTLRANLISNYALLRRLAPQMKAAGGAYVLNVSSYFGGEKYVAIPYPNRSDYAVSKAGQRAMVESLARFLGPEIQINAIAPGPVEGERLKGAGSRPGLFMRRARLILENKRLNEVFAALLAARHEGATIADLLPDLFANDIQSIANSAAMPAPLRRLATMLRETSDAGGSAQSYLMNATIARKLLNRLENGGYITLHDRRALTVEPPEPFFTEAQIEREAIKVRDGILGMLHLQRMPTEFDVALATVFYLADRNVTGETFHPSGGLRFERTVTEGELFGKPGQQRLERLKGSVVYLIGEHLRQHLVLLARTFLDEIHVARVVLLTETTQAATDLAAELSDYEAAGRFVVIPTCGDIEGGIDRAMAEYGRPGPVISTPFRPLPDRALSARNGDWSSVLTTAEFEELVEQQITHHFRVARKAGLIEGANVTLVTPPTSARSTSEEFALANFVKTTLHALTATAGAESERTVPHVPVNQVDLTRRARSEEPRTPSEEEEELQRFVNAVLLTSAPLPTPLESRYRARIYRGNAITV

SEQ ID NO: 60 - protein, 1217 aa, Erythrobacter sp.
MSKEGNAAKGRLEGKVALITGAAGNLGNEISRAFAREGAFVVMTGRTEERISAAREQLIADTGVAPERIDTAVLDGGNPDSIRAAMAKLRKEYGRIDILINNAGSAGPKQPLHNVPLSPQEMEACGDTETVRDAMLNILGVTWNMARIVAPMMPVGGAMVNISTIFSHTRYYGRTAYVVPKAALNALSNQLASELGPRGIRVNTVFPGPIESDRIRTVFAAMDEVQSQPKDTTANYFTGRMALTRSVNGKVDGKPLPNPKDIAGTCLFLASEEAAGIAGEEVDVTHGLSANRTSASTYMTRPSMRSLDGAGLNIFIVSGENWDDALVAAHTLIGSGAKVRLGLARNADVAQANARLKAQGIGEELTVTRFNRAEPDAMEDALAAFSGDVDGAITGAIILPVKPSGHFTGSLLAADDDTVTKFMDTELVGAIAVSRSLARYWHGREDLQSPPRCVFMTNPGDPLGNSFASVLSAGITQLIRIWRDEERVQAGNGSTEHAVWSNQIVRHTNTEDENTRFASGHATRVLFREQHIAEIDLKLPANISEETGSRKAMVGFAENITGLHLGKVAFITGGSAGIGGQVARLLALAGAKVMMVARRESELVAARDRIVGELQDIGFAGVERRVKYMADIDVSDFASLDKAVDATLEEFGRIDYLINNAGVAGAEDMVIDMEPEAWRFTLDANLISNYHLMQRVVPLMKEQGSGYVLNVSSYFGGEKFLAVAYPNRADYGLSKAGQRAMVEAFSPFLGPEVQCNAIAPGPVDGDRLSGTGGKPGLFQRRAKLILENKRLNAVYSAVIHAIREGGDAAKILTRLSRNSTSTLSHDAEAPEELRKLALDFASQGDGLCTWDQYLLTDAMAQRLLVRLQLGGFLLGSNEWASLSSSEQTWLKLSPPDDKPFLPAAQVDKVANGVGKGVISQLHLGAMPTEAEVAQATVFFLADRAVSGETFMPSGGLRVERSNTEREMFGSPKQERIDKMKGKTVWIIGEHLSDYVAATIEELVSGCGVAKVVLIAKDKSGEKAVRDQLPNDLSKDALEVLIAGDGLEEAMDEALGHWGKPTTVLSMPGEPLPDHLFEGGNPLSTKDFAHMVEANITRHYRVTRKASLYDGCQVVLVSPDVPYGSDGPGVALANFVKTSLHAFTATVAVENERLVHDVPVNQINLTRRVSSEEPRDADEHAEELRRFTRAVLLVGAPLPDAQDSRYRSKIYRGTSMTV

SEQ ID NO: 61 - protein, 357 aa, Metallosphaera sedula
MRRTLKAAILGATGLVGIEYVRMLADHPYIKPTYLAGKGSVGKPYGEIVRWQTVGNVPKEVANQEVKPTDPKLMDDVDIIFSPLPQGAAGPVEEQFAKLGFNVISNSPDHRFDMDVPMIIPEVNPHTVTLIDEQRKRRDWKGFIVTTPLCTAQGAAIPLTPIYQNFKMSGVMITTMQSLSGAGYPGIASLDIVDNALPLGDGYDAKTVKEITRILSEVKRNVQEPGVNEITLDATTHRIATIHGHYEVAYVTFKEDTDVRKVMESMESFKGEPQDLKLPTAPEKPIIVTTQDARPQVFFDRWAGNPPGMSVVVGRLKQVNPRTIRFVSLIHNTVRGAAGGGVLTAELLVEKGYIDKR

SEQ ID NO: 62 - protein, 356 aa, Sulfolobus tokodaii
MRRTLKAAILGATGLVGIEYVRMLSNHPYIKPAYLAGKGSVGKPYGEVVRWQTVGQVPKEIADMEIKPTDPKLMDDVDIIFSPLPQGAAGPVEEQFAKEGFPVISNSPDHRFDPDVPLLVPELNPHTISLIDEQRKRREWKGFIVTTPLCTAQGAAIPLGAIFKDYKMDGAFITTIQSLSGAGYPGIPSLDVVDNILPLGDGYDAKTIKEIFRILSEVKRNVDEPKLEDVSLAATTHRIATIHGHYEVLYVSFKEETAAEKVKETLENFRGEPQDLKLPTAPSKPIIVMNEDTRPQVYFDRWAGDIPGMSVVVGRLKQVNKRMIRLVSLIHNTVRGAAGGGILAAELLVEKGYIEK

SEQ ID NO: 63 - protein, 482 aa, Saccharomyces cerevisiae
MSAFVRVVPRISRSSVLTRSLRLQLRCYASYPEHTIIGMPALSPTMTQGNLAAWTKKEGDQLSPGEVIAEIETDKAQMDFEFQEDGYLAKILVPEGTKDIPVNKPIAVYVEDKADVPAFKDFKLEDSGSDSKTSTKAQPAEPQAEKKQEAPAEETKTSAPEAKKSDVAAPQGRIFASPLAKTIALEKGISLKDVHGTGPRGRITKADIESYLEKSSKQSSQTSGAAAATPAAATSSTTAGSAPSPSSTASYEDVPISTMRSIIGERLLQSTQGIPSYIVSSKISISKLLKLRQSLNATANDKYKLSINDLLVKAITVAAKRVPDANAYWLPNENVIRKFKNVDVSVAVATPTGLLTPIVKNCEAKGLSQISNEIKELVKRARINKLAPEEFQGGTICISNMGMNNAVNMFTSIINPPQSTILAIATVERVAVEDAAAENGFSFDNQVTITGTFDHRTIDGAKGAEFMKELKTVIENPLEMLL

SEQ ID NO: 64 - protein, 420 aa, Saccharomyces cerevisiae
MLAASFKRQPSQLVRGLGAVLRTPTRIGHVRTMATLKTTDKKAPEDIEGSDTVQIELPESSFESYMLEPPDLSYETSKATLLQMYKDMVIIRRMEMACDALYKAKKIRGFCHLSVGQEAIAVGIENAITKLDSIITSYRCHGFTFMRGASVKAVLAELMGRRAGVSYGKGGSMHLYAPGFYGGNGIVGAQVPLGAGLAFAHQYKNEDACSFTLYGDGASNQGQVFESFNMAKLWNLPVVFCCENNKYGMGTAASRSSAMTEYFKRGQYIPGLKVNGMDILAVYQASKFAKDWCLSGKGPLVLEYETYRYGGHSMSDPGTTYRTRDEIQHMRSKNDPIAGLKMHLIDLGIATEAEVKAYDKSARKYVDEQVELADAAPPPEAKLSILFEDVYVKGTETPTLRGRIPEDTWDFKKQGFASRD

SEQ ID NO: 65 - protein, 366 aa, Saccharomyces cerevisiae
MFSRLPTSLARNVARRAPTSFVRPSAAAAALRFSSTKTMTVREALNSAMAEELDRDDDVFLIGEEVAQYNGAYKVSKGLLDRFGERRVVDTPITEYGFTGLAVGAALKGLKPIVEFMSFNFSMQAIDHVVNSAAKTHYMSGGTQKCQMVFRGPNGAAVGVGAQHSQDFSPWYGSIPGLKVLVPYSAEDARGLLKAAIRDPNPVVFLENELLYGESFEISEEALSPEFTLPYKAKIEREGTDISIVTYTRNVQFSLEAAEILQKKYGVSAEVINLRSIRPLDTEAIIKTVKKTNHLITVESTFPSFGVGAEIVAQVMESEAFDYLDAPIQRVTGADVPTPYAKELEDFAFPDTPTIVKAVKEVLSIE

SEQ ID NO: 66 - protein, 499 aa, Saccharomyces cerevisiae
MLRIRSLLNNKRAFSSTVRTLTINKSHDVVIIGGGPAGYVAAIKAAQLGFNTACVEKRGKLGGTCLNVGCIPSKALLNNSHLFHQMHTEAQKRGIDVNGDIKINVANFQKAKDDAVKQLTGGIELLFKKNKVTYYKGNGSFEDETKIRVTPVDGLEGTVKEDHILDVKNIIVATGSEVTPFPGIEIDEEKIVSSTGALSLKEIPKRLTIIGGGIIGLEMGSVYSRLGSKVTVVEFQPQIGASMDGEVAKATQKFLKKQGLDFKLSTKVISAKRNDDKNVVEIVVEDTKTNKQENLEAEVLLVAVGRRPYIAGLGAEKIGLEVDKRGRLVIDDQFNSKFPHIKVVGDVTFGPMLAHKAEEEGIAAVEMLKTGHGHVNYNNIPSVMYSHPEVAWVGKTEEQLKEAGIDYKIGKFPFAANSRAKTNQDTEGFVKILIDSKTERILGAHIIGPNAGEMIAEAGLALEYGASAEDVARVCHAHPTLSEAFKEANMAAYDKAIHC

SEQ ID NO: 67 - protein, 887 aa, Escherichia coli
MSERFPNDVDPIETRDWLQAIESVIREEGVERAQYLIDQLLAEARKGGVNVAAGTGISNYINTIPVEEQPEYPGNLELERRIRSAIRWNAIMTVLRASKKDLELGGHMASFQSSATIYDVCFNHFFRARNEQDGGDLVYFQGHISPGVYARAFLEGRLTQEQLDNFRQEVHGNGLSSYPHPKLMPEFWQFPTVSMGLGPIGAIYQAKFLKYLEHRGLKDTSKQTVYAFLGDGEMDEPESKGAITIATREKLDNLVFVINCNLQRLDGPVTGNGKIINELEGIFEGAGWNVIKVMWGSRWDELLRKDTSGKLIQLMNETVDGDYQTFKSKDGAYVREHFFGKYPETAALVADWTDEQIWALNRGGHDPKKIYAAFKKAQETKGKATVILAHTIKGYGMGDAAEGKNIAHQVKKMNMDGVRHIRDRFNVPVSDADIEKLPYITFPEGSEEHTYLHAQRQKLHGYLPSRQPNFTEKLELPSLQDFGALLEEQSKEISTTIAFVRALNVMLKNKSIKDRLVPIIADEARTFGMEGLFRQIGIYSPNGQQYTPQDREQVAYYKEDEKGQILQEGINELGAGCSWLAAATSYSTNNLPMIPFYIYYSMFGFQRIGDLCWAAGDQQARGFLIGGTSGRTTLNGEGLQHEDGHSHIQSLTIPNCISYDPAYAYEVAVIMHDGLERMYGEKQENVYYYITTLNENYHMPAMPEGAEEGIRKGIYKLETIEGSKGKVQLLGSGSILRHVREAAEILAKDYGVGSDVYSVTSFTELARDGQDCERWNMLHPLETPRVPYIAQVMNDAPAVASTDYMKLFAEQVRTYVPADDYRVLGTDGFGRSDSRENLRHHFEVDASYVVVAALGELAKRGEIDKKVVADAIAKFNIDADKVNPRLA

SEQ ID NO: 68 - protein, 630 aa, Escherichia coli
MAIEIKVPDIGADEVEITEILVKVGDKVEAEQSLITVEGDKASMEVPSPQAGIVKEIKVSVGDKTQTGALIMIFDSADGAADAAPAQAEEKKEAAPAAAPAAAAAKDVNVPDIGSDEVEVTEILVKVGDKVEAEQSLITVEGDKASMEVPAPFAGTVKEIKVNVGDKVSTGSLIMVFEVAGEAGAAAPAAKQEAAPAAAPAPAAGVKEVNVPDIGGDEVEVTEVMVKVGDKVAAEQSLITVEGDKASMEVPAPFAGVVKELKVNVGDKVKTGSLIMIFEVEGAAPAAAPAKQEAAAPAPAAKAEAPAAAPAAKAEGKSEFAENDAYVHATPLIRRLAREFGVNLAKVKGTGRKGRILREDVQAYVKEAIKRAEAAPAATGGGIPGMLPWPKVDFSKFGEIEEVELGRIQKISGANLSRNWVMIPHVTHFDKTDITELEAFRKQQNEEAAKRKLDVKITPVVFIMKAVAAALEQMPRFNSSLSEDGQRLTLKKYINIGVAVDTPNGLVVPVFKDVNKKGIIELSRELMTISKKARDGKLTAGEMQGGCFTISSIGGLGTTHFAPIVNAPEVAILGVSKSAMEPVWNGKEFVPRLMLPISLSFDHRVIDGADGARFITIINNTLSDIRRLVM

SEQ ID NO: 69 - protein, 474 aa, Escherichia coli [sequence omitted]

SEQ ID NO: 70 - protein, 371 aa, Bacillus subtilis
MAAKTKKAIVDSKKQFDAIKKQFETFQILNEKGEVVNEAAMPDLTDDQLKELMRRMVFTRVLDQRSISLNRQGRLGFYAPTAGQEASQIATHFALEKEDFVLPGYRDVPQLIWHGLPLYQAFLFSRGHFRGNQMPDDVNALSPQIIIGAQYIQTAGVALGLKKRGKKAVAITYTGDGGASQGDFYEGINFAGAYKAPAIFVVQNNRYAISTPVEKQSAAETIAQKAVAAGIVGVQVDGMDPLAVYAATAEARERAINGEGPTLIETLTFRYGPHTMAGDDPTKYRTKEIENEWEQKDPLVRFRAFLENKGLWSEEEEAKVIEDAKEEIKQAIKKADAEPKQKVTDLMKIMYEKMPHNLEEQFEIYTQKESK

SEQ ID NO: 71 - protein, 325 aa, Bacillus subtilis
MAQMTMIQAITDALRTELKNDENVLVFGEDVGVNGGVFRATEGLQKEFGEDRVFDTPLAESGIGGLALGLGLNGFRPVMEIQFFGFVYEVMDSVSGQMARMRYRSGGRWTSPVTIRSPFGGGVHTPELHADSLEGLVAQQPGIKVVIPSTPYDAKGLLISAIRDNDPVVFLEHMKLYRSFRQEVPEEEYTIELGKADVKREGTDLSIITYGAMVHESLKAADELEKDGISAEVVDLRTVSPLDIDTIIASVEKTGRAIVVQEAQKQAGIAANVVAEINDRAILSLEAPVLRVAAPDTVFPFSQAESVWLPNHKDVLETARKVLEF

SEQ ID NO: 72 - protein, 442 aa, Bacillus subtilis
MAFEFKLPDIGEGIHEGEIVKWFVKPNDEVDEDDVLAEVQNDKAVVEIPSPVKGKVLELKVEEGTVATVGQTIITFDAPGYEDLQFKGSDESDDAKTEAQVQSTAEAGQDVAKEEQAQEPAKATGAGQQDQAEVDPNKRVIAMPSVRKYAREKGVDIRKVTGSGNNGRVVKEDIDSFVNGGAQEAAPQETAAPQETAAKPAAAPAPEGEFPETREKMSGIRKAIAKAMVNSKHTAPHVTLMDEVDVTNLVAHRKQFKQVAADQGIKLTYLPYVVKALTSALKKFPVLNTSIDDKTDEVIQKHYFNIGIAADTEKGLLVPVVKNADRKSVFEISDEINGLATKAREGKLAPAEMKGASCTITNIGSAGGQWFTPVINHPEVAILGIGRIAEKAIVRDGEIVAAPVLALSLSFDHRMIDGATAQNALNHIKRLLNDPQLILMEA

SEQ ID NO: 73 - protein, 470 aa, Bacillus subtilis
MVVGDFPIETDTLVIGAGPGGYVAAIRAAQLGQKVTVVEKATLGGVCLNVGCIPSKALINAGHRYENAKHSDDMGITAENVTVDFTKVQEWKASVVNKLTGGVAGLLKGNKVDVVKGEAYFVDSNSVRVMDENSAQTYTFKNAIIATGSRPIELPNFKYSERVLNSTGALALKEIPKKLVVIGGGYIGTELGTAYANFGTELVILEGGDEILPGFEKQMSSLVTRRLKKKGNVEIHTNAMAKGVEERPDGVTVTFEVKGEEKTVDADYVLITVGRRPNTDELGLEQVGIEMTDRGIVKTDKQCRTNVPNIYAIGDIIEGPPLAHKASYEGKIAAEAIAGEPAEIDYLGIPAVVFSEPELASVGYTEAQAKEEGLDIVAAKFPFAANGRALSLNETDGFMKLITRKEDGLVIGAQIAGASASDMISELSLAIEGGMTAEDIAMTIHAHPTLGEITMEAAEVAIGSPIHIVK

SEQ ID NO: 74 - protein, 2123 aa, Saccharomyces cerevisiae
MRSIRKWAYETFNDEKIIQFVVMATPDDLHANSEYIRMADQYVQVPGGTNNNNYANIDLILDVAEQTDVDAVWAGWGHASENPCLPELLASSQRKILFIGPPGRAMRSLGDKISSTIVAQSAKIPCIPWSGSHIDTIHIDNKTNFVSVPDDVYVRGCCSSPEDALEKAKLIGFPVMIKASEGGGGKGIRRVDNEDDFIALYRQAVNETPGSPMFVMKVVTDARHLEVQLLADQYGTNITLFGRDCSIQRRHQKIIEEAPVTITKPETFQRMERAAIRLGELVGYVSAGTVEYLYSPKDDKFYFLELNPRLQVEHPTTEMISGVNLPATQLQIAMGIPMHMISDIRKLYGLDPTGTSYIDFKNLKRPSPKGHCISCRITSEDPNEGFKPSTGKIHELNFRSSSNVWGYFSVGNNGAIHSFSDSQFGHIFAVGNDRQDAKQNMVLALKDFSIRGEFKTPIEYLIELLETRDFESNNISTGWLDDLILKNLSSDSKLDPTLAIICGAAMKAYVFTEKVRNKYLELLRRGQVPPKDFLKTKFPVDFIFDNNRYLFNVAQSSEEQFILSINKSQCEVNVQKLSSDCLLISVDGKCHTVYWKDDIRGTRLSIDSNTIFLEAELNPTQVISPTPGKLVKYLVRSGDHVFAGQQYAEIEIMKMQMPLVAKSDGVIELLRQPGSIIEAGDVIAKLTLDSPSKANESSLYRGELPVLGPPLIEGSRPNHKLRVLINRLENILNGYHENSGIETTLKELIKILRDGRLPYSEWDSQISTVRNRLPRQLNEGLGNLVKKSVSFPAKELHKLMKRYLEENTNDHVVYVALQPLLKISERYSEGLANHECEIFLKLIKKYYAVEKIFENHDIHEERNLLNLRRKDLTNLKKILCISLSHANVVAKNKLVTAILHEYEPLCQDSSKMSLKFRAVIHDLASLESKWAKEVAVKARSVLLRGIFPPIKKRKEHIKTLLQLHIKDTGAENIHSRNIYSCMRDFGNLIHSNLIQLQDLFFFFGHQDTALSSIASEIYARYAYGNYQLKSIKIHKGAPDLLMSWQFSSLRNYLVNSDGESDEFTKLSKPPSTSGKSSANSFGLLVNMRALESLEKTLDEVYEQIHIPEERLSSGENSLIVNILSPIRYRSENDLIKTLKIKLHENERGLSKLKVNRITFAFIAANAPAVKFYSFDGTTYDEISQIRNMDPSYEAPLELGKMSNYKIRSLPTYDSSIRIFEGISKFTPLDKRFFVRKIINSFMYNDQKTTEENLKAEINAQVVYMLEHLGAVDISNSDLNHIFLSFNTVLNIPVHRLEEIVSTILKTHETRLFQERITDVEICISVECLETKKPAPLRLLISNKSGYVVKIETYYEKIGKNGNLILEPCSEQSHYSQKSLSLPYSVKDWLQPKRYKAQFMGTTYVYDFPGLFHQAAIQQWKRYFPKHKLNDSFFSWVELIEQNGNLIKVNREPGLNNIGMVAFEIMVQTPEYPEGRNMIVISNDITYNIGSFGPREDLFFDRVTNYARERGIPRIYLAANSGAKLGIAEELIPLFRVAWNDPSDPTKGFQYLYLAPKDMQLLKDSGKGNSVVVEHKMVYGEERYIIKAIVGFEEGLGVECLQGSGLIAGATSKAYRDIFTITAVTCRSVGIGSYLVRLGQRTIQVEDKPIILTGASAINKVLGTDIYTSNLQIGGTQIMYKNGIAHLTASNDMKAIEKIMTWLSYVPAKRDMSPPLLETMDRWDRDVDFKPAKQVPYEARWLIEGKWDSNNNFQSGLFDKDSFFETLSGWAKGVIVGRARLGGIPVGVIAVETKTIEEIIPADPANLDSSEFSVKEAGQVWYPNSAFKTAQTINDFNYGEQLPLIILANWRGFSGGQRDMYNEVLKYGSFIVDALVDYKQPILIYIPPFGELRGGSWVVIDPTINPEQMEMYADVESRGGVLEPDGVVSIKYRKEKMIETMIRLDSTYGHLRRTLTEKKLSLEKQNDLTKRLKIRERQLIPIYNQISIQFADLHDRSTRMLVKGVIRNELEWKKSRRFLYWRLRRRLNEGQVIKRLQKKTCDNKTKMKYDDLLKIVQSWYNDLDVNDDRAVVEFIERNSKKIDKNIEEFEISLLIDELKKKFEDRRGNIVLEELTRLVDSKRKR

SEQ ID NO: 75 - protein, 319 aa, Escherichia coli
MSLNFLDFEQPIAELEAKIDSLTAVSRQDEKLDINIDEEVHRLREKSVELTRKIFADLGAWQIAQLARHPQRPYTLDYVRLAFDEFDELAGDRAYADDKAIVGGIARLDGRPVMIIGHQKGRETKEKIRRNFGMPAPEGYRKALRLMQMAERFKMPIITFIDTPGAYPGVGAEERGQSEAIARNLREMSRLGVPVVCTVIGEGGSGGALAIGVGDKVNMLQYSTYSVISPEGCASILWKSADKAPLAAEAMGIIAPRLKELKLIDSIIPEPLGGAHRNPEAMAASLKAQLLADLADLDVLSTEDLKNRRYQRLMSYGYA

SEQ ID NO: 76 - protein, 156 aa, Escherichia coli
MDIRKIKKLIELVEESGISELEISEGEESVRISRAAPAASFPVMQQAYAAPMMQQPAQSNAAAPATVPSMEAPAAAEISGHIVRSPMVGTFYRTPSPDAKAFIEVGQKVNVGDTLCIVEAMKMMNQIEADKSGTVKAILVESGQPVEFDEPLVVIE

SEQ ID NO: 77 - protein, 449 aa, Escherichia coli
MLDKIVIANRGEIALRILRACKELGIKTVAVHSSADRDLKHVLLADETVCIGPAPSVKSYLNIPAIISAAEITGAVAIHPGYGFLSENANFAEQVERSGFIFIGPKAETIRLMGDKVSAIAAMKKAGVPCVPGSDGPLGDDMDKNRAIAKRIGYPVIIKASGGGGGRGMRVVRGDAELAQSISMTRAEAKAAFSNDMVYMEKYLENPRHVEIQVLADGQGNAIYLAERDCSMQRRHQKVVEEAPAPGITPELRRYIGERCAKACVDIGYRGAGTFEFLFENGEFYFIEMNTRIQVEHPVTEMITGVDLIKEQLRIAAGQPLSIKQEEVHVRGHAVECRINAEDPNTFLPSPGKITRFHAPGGFGVRWESHIYAGYTVPPYYDSMIGKLICYGENRDVAIARMKNALQELIIDGIKTNVDLQIRIMNDENFQHGGTNIHYLEKKLGLQEK

SEQ ID NO: 78 - protein, 304 aa, Escherichia coli
MSWIERIKSNITPTRKASIPEGVWTKCDSCGQVLYRAELERNLEVCPKCDHHMRMTARNRLHSLLDEGSLVELGSELEPKDVLKFRDSKKYKDRLASAQKETGEKDALVVMKGTLYGMPVVAAAFEFAFMGGSMGSVVGARFVRAVEQALEDNCPLICFSASGGARMQEALMSLMQMAKTSAALAKMQERGLPYISVLTDPTMGGVSASFAMLGDLNIAEPKALIGFAGPRVIEQTVREKLPPGFQRSEFLIEKGAIDMIVRRPEMRLKLASILAKLMNLPAPNPEAPREGVVVPPVPDQEPEA

SEQ ID NO: 79 - protein, 282 aa, Chloroflexus aurantiacus
MEETAIPQSLTPWDRVQLARHPQRPHTLDYIAALCEDFVELHGDRRFGDDPAMVGGMATFAGQTVMVIGHQKGNDTRENMRRNFGMPHPEGYRKAQRLMRHAEKFGLPVICFVDTPAADPTKSSEERGQANAIAESIMLMTTLRVPSIAVVIGEGGSGGALAISVADRILMQENAIYSVAPPEAAASILWRDAAKAPEAARALKLTAADLYDLRIIDEVIPEPPGGAHADRLTAITTVGERLRVHLADLQQRDIDTLLRERYRKYRSMGQYQEQQMDFFGRM

SEQ ID NO: 80 - protein, 180 aa, Chloroflexus aurantiacus
MMLWGAMKDETTELPADQPDPFGLAAVRVLLQMLEQSDVYEITIENGNAKLHVKRGQPGGVIYSAPLPTAPVPSPSLPATPVTPFVQPPPAPEGPPVEMPAGHTITAPMVGTFYAAPSPRDRPFVQEGDEVRVGDTVGIVEAMKMMNEIESDVAGRVARILVKNGQPVEYGQPLMVIEPL

SEQ ID NO: 81 - protein, 455 aa, Chloroflexus aurantiacus
MIRKVLVANRGEIAVRIIRACQELGIRTVVAYSTADRDSLAVRLADEAVCIGPPPAAKSYLNAPALISAALVSGCDAIHPGYGFLSENPYFAEMCADCKLTFIGPPPEPIRLMGDKAIGRETMRKAGVPTVPGSDGEVRSLEEAIDVARQIGYPVLLKPSGGGGGRGMRVAYDEADLQRAFPTARAEAEAAFGNGALLLEKYLTRVRHVEIQVLADQYGHAIHLGERDCSAQRRHQKIVEEAPSPAVTPELRERMGADAVRGIKSIGYVNAGTLEFLLDQDGNYYFIEMNTRIQVEHPVTEQVTGIDLVRWQLLIASGERLTLRQEDIKITRHAIECRINAEDPERDFLPASGEVEFYLPPGGPGVRVDSHLYSGYTPPGTYDSLLAKIITFGDTRDEALNRMRRALNECVITGIKTTIPFQLALIDDPEFRAGRIHTGYVAELLRQWKETLNPV

SEQ ID NO: 82 - protein, 305 aa, Chloroflexus aurantiacus
MKEFFRLSRKGFTGREDQDSAQIPDDLWVKCSSCRELIYKKQLNDNLKVCPKCGHHMRLSAHEWLGLLDVGSFREMDANLLPTDPLGFVTDEESYAAKLAKTQQRTGMADAVIAGIGAISNMQICVAVADFSFMGASMGSVYGEKMARSAERAAELGVPLLTINTSGGARQQEGVIGLMQMAKVTMALTRLADAGQPHIALLVDPCYGGVTASYPSVADIIIAEPGANIGFAGKRLIEQIMRQKLPAGFQTAEFMLEHGMIDMVVPRSEMRDTLARILRLYRQRSTSPAKAELAGRRATLPQPIM

SEQ ID NO: 83 - protein, 378 aa, Bacillus subtilis
MIIGVPKEIKNNENRVALTPGGVSQLISNGHRVLVETGAGLGSGFENEAYESAGAEIIADPKQVWDAEMVMKVKEPLPEEYVYFRKGLVLFTYLHLAAEPELAQALKDKGVTAIAYETVSEGRTLPLLTPMSEVAGRMAAQIGAQFLEKPKGGKGILLAGVPGVSRGKVTIIGGGVVGTNAAKMAVGLGADVTIIDLNADRLRQLDDIFGHQIKTLISNPVNIADAVAEADLLICAVLIPGAKAPTLVTEEMVKQMKPGSVIVDVAIDQGGIVETVDHITTHDQPTYEKHGVVHYAVANMPGAVPRTSTIALTNVTVPYALQIANKGAVKALADNTALRAGLNTANGHVTYEAVARDLGYEYVPAEKALQDESSVAGA

SEQ ID NO: 84 - protein, 505 aa, Schizosaccharomyces pombe
MFTDYPNDINCESPRMSDLDGFCQNAFSDLNSLNQQVFKANYAVRGALAILADEIQDDLLENPSSYPFSEIVYANIGNPQQMGQSPITFVRQVLSLCQYPTLLDHAEEKWFQNLFPTDVVQRSKMLLKESGSLGAYSASQGIPLVRRHVADFIRARDGFDCEPSDIYLTSGASHAARLIMTLIIARPTDGVMVPAPQYPLYGAQIDLMSGSMVSYSLSEENNWDIDFDQFKKSFDEASKKGINVRLCVVINPGNPTGACISENSMEKVLRFAKAKGIVLLADEVYQNNIYQNKFHSFRRKLGELREKEPDNHWDQVSLISVNSVSKGQFGECGQRGGYLDVVNIPEPAKDQILKLATIDICPPVAGQLLVDMLVNPPKPGDPSYDLFIKEVDEIHEALRLQCRQLYEGTKRMKRVSCLEPHGAMYLHPSVSLPEKLITTAKAQKIQPDEFYAIELLKRSGICVVPGSGFGQPEGDYHIRITFLAKGTEYIERFVKAHNEIMDLYE

SEQ ID NO: 85 - protein, 507 aa, Saccharomyces cerevisiae
MTMTHQQDLKGVFTAKDLDFKPAGKITKKDLNTGVTKAEYAVRGAIPTRADELKEELKKNPEVLPFDDIINANIGNPQQLDQKPLTFTRQVLAILEYPEILRVGHNELASLNLFSRDALERAERLLNDIGGSIGAYSHSQGVPGIRQTVADFITRRDGGEPATPEDIYLTTGASSAATSLLSLLCKDSQTGLLIPIPQYPLYTASASLFNAQVLPYYLDEESNWSTNSDEIEKVVQDALKKQIRPSVLIVINPGNPTGAVLSEETIARICLIAAKYGITIISDEVYQENIFNDVKFHSMKKVLRKLQHLYPGKFDNVQLASLHSISKGFMDECGQRGGYMEIIGFSQEIRDALFKLMSISICSVVTGQAVVDLMVKPPQPGDESYEQDHDERLKIFHEMRTRANLLYETFKELEGIECQKPQGAMYLFPRLVLPKKALCESERLGIEPDEFYCTSLLESTGICTVPGSGFGQRPGTYHVRTTFLAPGTKWIQDWKEFHQDFFSKYRN

SEQ ID NO: 86 - protein, 471 aa, Bacillus subtilis
MKNKWYKPKRHWKEIELWKDVPEEKWNDWLWQLTHTVRTLDDLKKVINLTEDEEEGVRISTKTIPLNITPYYASLMDPDNPRCPVRMQSVPLSEEMHKTKYDLEDPLHEDEDSPVPGLTHRYPDRVLFLVTNQCSMYCRYCTRRRFSGQIGMGVPKKQLDAAIAYIRETPEIRDCLISGGDGLLINDQILEYILKELRSIPHLEVIRIGTRAPVVFPQRITDHLCEILKKYHPVWLNTHFNTSIEMTEESVEACEKLVNAGVPVGNQAVVLAGINDSVPIMKKLMHDLVKIRVRPYYIYQCDLSEGIGHFRAPVSKGLEIIEGLRGHTSGYAVPTFVVDAPGGGGKIALQPNYVLSQSPDKVILRNFEGVITSYPEPENYIPNQADAYFESVFPETADKKEPIGLSAIFADKEVSFTPENVDRIKRREAYIANPEHETLKDRREKRDQLKEKKFLAQQKKQKETECGGDSS

SEQ ID NO: 87 - protein, 416 aa, Porphyromonas gingivalis
MAESRRKYYFPDVTDEQWNDWHWQVLNRIETLDQLKKYVTLTAEEEEGVKESLKVLRMAITPYYLSLIDPENPNCPIRKQAIPTHQELVRAPEDQVDPLSEDEDSPVPGLTHRYPDRVLFLITDKCSMYCRHCTRRRFAGQKDASSPSERIDRCIDYIANTPTVRDVLLSGGDALLVSDERLEYILKRLREIPHVEIVRIGSRTPVVLPQRITPQLVDMLKKYHPVWLNTHFNHPNEVTEEAVEACERMANAGIPLGNQTVLLRGINDCTHVMKRLVHLLVKMRVRPYYIYVCDLSLGIGHFRTPVSKGIEIIENLRGHTSGYAVPTFVVDAPGGGGKIPVMPNYVVSQSPRHVVLRNYEGVITTYTEPENYHEECDCEDCRAGKHKEGVAALSGGQQLAIEPSDLARKKRKFDKN

SEQ ID NO: 88 - protein, 425 aa, Fusobacterium nucleatum
MNTVNTRKKFFPNVTDEEWNDWTWQVKNRIEKIDDLKKYVELSAEEEEGVVRTLETLRMAITPYYFSLIDMNSDRCPIRKQAIPTIQEIHQSDADLLDPLHEDEDSPVPGLTHRYPDRVLLLITDMCSMYCRHCTRRRFAGSSDDAMPMDRIDKAIEYIAKTPQVRDVLLSGGDALLVSDKKLESIIQKLRAIPHVEIIRIGSRTPVVLPQRITPELCNMLKKYHPIWLNTHFNHPQEVTPEAKKACEMLADAGVPLGNQTVLLRGINDSVPVMKRLVHDLVMMRVRPYYIYQCDLSMGLEHFRTPVSKGIEIIEGLRGHTSGYAVPTFVVDAPGGGGKTPVMPQYVISQSPHRVVLRNFEGVITTYTEPENYTHEPCYDEEKFEKMYEISGVYMLDEGLKMSLEPSHLARHERNKKRAEAEGKK

SEQ ID NO: 89 - protein, 517 aa, Megasphaera elsdenii
MRKVEIITAEQAAQLVKDNDTITSIGFVSSAHPEALTKALEKRFLDTNTPQNLTYIYAGSQGKRDGRAAEHLAHTGLLKRAIIGHWQTVPAIGKLAVENKIEAYNFSQGTLVHWFRALAGHKLGVFTDIGLETFLDPRQLGGKLNDVTKEDLVKLIEVDGHEQLFYPTFPVNVAFLRGTYADESGNITMDEEIGPFESTSVAQAVHNCGGKVVVQVKDVVAHGSLDPRMVKIPGIYVDYVVVAAPEDHQQTYDCEYDPSLSGEHRAPEGATDAALPMSAKKIIGRRGALELTENAVVNLGVGAPEYVASVAGEEGIADTITLTVEGGAIGGVPQGGARFGSSRNADAIIDHTYQFDFYDGGGLDIAYLGLAQCDGSGNINVSKFGTNVAGCGGFPNISQQTPNVYFCGTFTAGGLKIAVEDGKVKILQEGKAKKFIKAVDQITFNGSYAARNGKHVLYITERCVFELTKEGLKLIEVAPGIDIEKDILAHMDFKPIIDNPKLMDARLFQDGPMGLKK

SEQ ID NO: 90 - protein, 145 aa, Clostridium propionicum
MVGKKVVHHLMMSAKDAHYTGNLVNGARIVNQWGDVGTELMVYVDGDISLFLGYKDIEFTAPVYVGDFMEYHGWIEKVGNQSYTCKFEAWKVATMVDITNPQDTRATACEPPVLCGRATGSLFIAKKDQRGPQESSFKERKHPGE

SEQ ID NO: 91 - protein, 260 aa, Phytophthora sojae
MAAEYESILTEVRGKVAIITLNRPKALNALCSPLIEELNGAAHAFDADPSIGAIVITGSGSKAFAAGADIKEMATKTFVDAYKSNMFANWGDITKVSKPVIAAVNGYALGGGCELAMLCDLIIAGDSAKFGQPEITLGTIPGCGGTQRLIRAVGKSKAMEMILTGNMIDAQQAERDGLVARVVPADQLLDEALKTANKIASFSQPVVKMAKEAVNAAYEQSLQEGLKYESRLFWSSFATKDQKEGMAAFVEKRKADFKDE

SEQ ID NO: 92 - protein, 258 aa, Chloroflexus aurantiacus
MSEESLVLSTIEGPIAILTLNRPQALNALSPALIDDLIRHLEACDADDTIRVIIITGAGRAFAAGADIKAMANATPIDMLTSGMIARWARIAAVRKPVIAAVNGYALGGGCELAMMCDIIIASENAQFGQPEINLGIIPGAGGTQRLTRALGPYRAMELILTGATISAQEALAHGLVCRVCPPESLLDEARRIAQTIATKSPLAVQLAKEAVRMAAETTVREGLAIELRNFYLLFASADQKEGMQAFIEKRAPNFSGR

SEQ ID NO: 93 - protein, 288 aa, Rhodospirillum rubrum
MAAAPGPPAARPRAARQSRMILPPLREQAQMAYENILVETNGKVGIVTLNRPKALNALSAGLVRDLGAALDAFEADVNVHVIVLTGSDKAFAAGADIKEMAEKSYMDAYLEDFITKGWERVTTCRKPIIAAVAGFALGGGCEMAMMCDFIIAAQNAKFGQPEINLGTLPGAGGTQRLTRFVGKSKAMDMCLTGRMMDADEAWKCGLVSRIVPVDDLKDEVLKIAEAIADKSLPITMMVKEAVNAAYETTLAQGVRFERRLFQASFATDDQKEGMNAFIEKRQPSFTDR

SEQ ID NO: 94 - protein, 258 aa, Rhodobacter capsulatus
MSYQTLIVEIADGVALIRLNRPEALNALNSQLLGELAAALSTLDADPAVRCFVLTGSDKAFAAGADIKEMADKSFVDMLKLDFFGTEGDAILRTRKPVIAAVAGYALGGGCELAMMCDFILCAENAKFGQPEINLGVVAGIGGTQRLTRFVGKSKSMEMHLTGRFMDAAEAERSGLVSRVLPLADLLPEALATARKIAEKSAIATMVAKDCVNRAYETTLREGVLYERRVFHALFATEDQKEGMAAFAEKRPAKFADK

SEQ ID NO: 95 - protein, 290 aa, Homo sapiens
MAALRVLLSCARGPLRPPVRCPAWRPFASGANFEYIIAEKRGKNNTVGLIQLNRPKALNALCDGLIDELNQALKIFEEDPAVGAIVLTGGDKAFAAGADIKEMQNLSFQDCYSSKFLKHWDHLTQVKKPVIAAVNGYAFGGGCELAMMCDIIYAGEKAQFAQPEILIGTIPGAGGTQRLTRAVGKSLAMEMVLTGDRISAQDAKQAGLVSKICPVETLVEEAIQCAEKIASNSKIVVAMAKESVNAAFEMTLTEGSKLEKKLFYSTFATDDRKEGMTAFVEKRKANFKDQ

SEQ ID NO: 96 - protein, 399 aa, Pseudomonas fluorescens
MRVVLCKFALLRSHDGSSANILIKNNKSRELSMTAQVSTEASHAAILQDEVLAEVRNHIGHLTLNRPAGLNALTLQMVRSLTSQLQAWSDDPQVYAVVLRGAGEKAFCAGGDIRSLYDSFKNGDTLHQDFFVEEYALDLAIHHYRKPVLALMDGFVLGGGMGLVQGADLRVVTERSRLAMPEVAIGYFPDVGGSYFLPRIPGELGIYLGVTGVQIRAADALYCGLADWYLDSHKLADLDQKLDNLRWHDSPLKDLQGALARLAVQQLPDAPLAALRPAIDHFFALPDVPSIVEQLQQVTVADSHEWALNTVSLMQTRSPLAMAVTLEMLRRGRRLSLEQCFALELHLDRQWFERGDLIEGVRALIIDKDKSPRWNPPTLHGLALNHVESFFHHFEKVVK

SEQ ID NO: 97 - protein, 351 aa, Bacillus cereus
MTEQVLFSVSENGVATITLNRPKALNSLSYDMLQPIGQKLKEWEHDERIALIVLKGAGTKGFCAGGDIKTLYEARSNEVALQHAERFFEEEYEIDTYIYQYTKPIIACLDGIVMGGGVGLTNGAKYRIVTERTKWAMPEMNIGFFPDVGAAYFLNKAPGYTGRFVALTASILKASDVLFINAADYFMTSDSLPEFLTELESVNWHKEDDVHTNLKEVIRTFATAPNLESELAPSLEVINSHFAFDTIEEIIHSLEKDESSFALKTKEILLSKSPISLKVTLKQFIDGQDKSVEECFATDLILAKNFMRHEDFFEGVRSVVVDKDQNPNYKYKQLSDVSEEDVNRFFNLLNA

SEQ ID NO: 98 - protein, 381 aa, Homo sapiens
MWRLMSRFNAFKRTNTILHHLRMSKHTDAAEEVLLEKKGCAGVITLNRPKFLNALTLNMIRQIYPQLKKWEQDPETFVIIIKGAGGKAFCAGGDIRVISEAEKAKQKIAPVFFREEYMLNNAVGSCQKPYVALIHGITMGGGVGLSVHGQFRVATEKCLFAMPETAIGLFPDVGGGYFFATTPRKTWLLPCINGFRLKGRDVYRAGIATHFVDSEKLAMLEEDLLALKSPSKENIASVLENYHTESKIDRDKSFILEEHMDKINSCFSANTVEEIIENLQQDGSSFALEQLKVINKMSPTSLKITLRQLMEGSSKTLQEVLTMEYRLSQACMRGHDFHEGVRAVLIDKDQSPKWKPADLKEVTEEDLNNHFKSLGSSDLKF

SEQ ID NO: 99 - protein, 261 aa, Megasphaera elsdenii
VKTVYTLGIDVGSSSSKAVILEDGKKIVAHAVVEIGTGSTGPERVLDEVFKDTNLKIEDMANIIATGYGRFNVDCAKGEVSEITCHAKGALFECPGTTTILDIGGQDVKSIKLNGQGLVMQFAMNDKCAAGTGRFLDVMSKVLEIPMSEMGDWYFKSKHPAAVSSTCTVFAESEVISLLSKNVPKEDIVAGVHQSIAAKACALVRRVGVGEDLTMTGGGSRDPGVVDAVSKELGIPVRVALHPQAVGALGAALIAYDKIKK

SEQ ID NO: 100 - protein, 428 aa, Megasphaera elsdenii
MSEEKTVDIESMSSKEALGYFLPKVDEDARKAKKEGRLVCWSASVAPPEFCTAMDIAIVYPETHAAGIGARHGAPAMLEVAENKGYNQDICSYCRVNMGYMELLKQQALTGETPEVLKNSPASPIPLPDVVLTCNNICNTLLKWYENLAKELNVPLINIDVPFNHEFPVTKHAKQYIVGEFKHAIKQLEDLCGRPFDYDKFFEVQKQTQRSIAAWNKIATYFQYKPSPLNGFDLFNYMGLAVAARSLNYSEITFNKFLKELDEKVANKKWAFGENEKSRVTWEGIAVWIALGHTFKELKGQGALMTGSAYPGMWDVSYEPGDLESMAEAYSRTYINCCLEQRGAVLEKVVRDGKCDGLIMHQNRSCKNMSLLNNEGGQRIQKNLGVPYVIFDGDQTDARNFSEAQFDTRVEALAEMMADKKANEGGNH

SEQ ID NO: 101 - protein, 372 aa, Megasphaera elsdenii
MSQIDELISKLQEVSNHPQKTVLNYKKQGKGLVGMMPYYAPEEIVYAAGYLPVGMFGSQNPQISAARTYLPPFACSLMQADMELQLNGTYDCLDAVIFSVPCDTLRCMSQKWHGKAPVIVFTQPQNRKIRPAVDFLKAEYEHVRTELGRILNVKISDLAIQEAIKVYNENRQVMREFCDVAAQYPQIFTPIKRHDVIKARWFMDKAEHTALVRELIDAVKKEPVQPWNGKKVILSGIMAEPDEFLDIFSEFNIAVVADDLAQESRQFRTDVPSGIDPLEQLAQQWQDFDGCPLALNEDKPRGQMLIDMTKKYNADAVVICMMRFCDPEEFDYPIYKPEFEAAGVRYTVLDLDIESPSLEQLRTRIQAFSEIL

SEQ ID NO: 102 - protein, 519 aa, Saccharomyces cerevisiae
MFSRSTLCLKTSASSIGRLQLRYFSHLPMTVPIKLPNGLEYEQPTGLFINNKFVPSKQNKTFEVINPSTEEEICHIYEGREDDVEEAVQAADRAFSNGSWNGIDPIDRGKALYRLAELIEQDKDVIASIETLDNGKAISSSRGDVDLVINYLKSSAGFADKIDGRMIDTGRTHFSYTKRQPLGVCGQIIPWNFPLLMWAWKIAPALVTGNTVVLKTAESTPLSALYVSKYIPQAGIPPGVINIVSGFGKIVGEAITNHPKIKKVAFTGSTATGRHIYQSAAAGLKKVTLELGGKSPNIVFADAELKKAVQNIILGIYYNSGEVCCAGSRVYVEESIYDKFIEEFKAASESIKVGDPFDESTFQGAQTSQMQLNKILKYVDIGKNEGATLITGGERLGSKGYFIKPTVFGDVKEDMRIVKEEIFGPVVTVTKFKSADEVINMANDSEYGLAAGIHTSNINTALKVADRVNAGTVWINTYNDFHHAVPFGGFNASGLGREMSVDALQNYLQVKAVRAKLDE

SEQ ID NO: 103 - protein, 495 aa, Escherichia coli
MNFHHLAYWQDKALSLAIENRLFINGEYTAAAENETFETVDPVTQAPLAKIARGKSVDIDRAMSAARGVFERGDWSLSSPAKRKAVLNKLADLMEAHAEELALLETLDTGKPIRHSLRDDIPGAARAIRWYAEAIDKVYGEVATTSSHELAMIVREPVGVIAAIVPWNFPLLLTCWKLGPALAAGNSVILKPSEKSPLSAIRLAGLAKEAGLPDGVLNVVTGFGHEAGQALSRHNDIDAIAFTGSTRTGKQLLKDAGDSNMKRVWLEAGGKSANIVFADCPDLQQAASATAAGIFYNQGQVCIAGTRLLLEESIADEFLALLKQQAQNWQPGHPLDPATTMGTLIDCAHADSVHSFIREGESKGQLLLDGRNAGLAAAIGPTIFVDVDPNASLSREEIFGPVLVVTRFTSEEQALQLANDSQYGLGAAVWTRDLSRAHRMSRRLKAGSVFVNNYNDGDMTVPFGGYKQSGNGRDKSLHALEKFTELKTIWISLEA

SEQ ID NO: 104 - protein, 495 aa, Klebsiella pneumoniae
MNFQHLAYWQEKAKNLAIETRLFINGEYCAAADNTTFETIDPAAQQTLAQVARGKKADVERAVKAARQAFDNGDWSQASPAQRKAILTRFADLMEAHREELALLETLDTGKPIRHSLRDDIPGAARAIRWYAEALDKVYGEVAPTGSNELAMIVREPIGVIAAVVPWNFPLLLACWKLGPALAAGNSVILKPSEKSPLTALRLAGLAKEAGLPDGVLNVVSGFGHEAGQALALHPDVEVITFTGSTRTGKQLLKDAGDSNMKRVWLEAGGKSANIVFADCPDLQQAVRATAGGIFYNQGQVCIAGTRLLLEESIADEFLARLKAEAQHWQPGNPLDPDTTMGMLIDNTHADNVHSFIRGGESQSTLFLDGRKNPWPAAVGPTIFVDVDPASTLSREEIFGPVLVVTRFKSEEEALKLANDSDYGLGAAVWTRDLSRAHRMSRRLKAGSVFVNNYNDGDMTVPFGGYKQSGNGRDKSLHALEKFTELKTIWIALES

SEQ ID NO: 105 - DNA, 1053 bp, Issatchenkia orientalis
atgtcttacgaaatcccacaaacacaaaaggcctgtgtcttttacgaaaacggcggcccaatcacatacaaggacattccagttccaaagccaaaacctactgagattttagtcaaggttctgtactctggtgtctgccacaccgacttgcacgcatggaagggtgactggcctctagctaccaagttgccattggttggtggtcacgaaggtgccggtgttgttgttgccaagggtgaaaacgtcacctcttttgagattggtgattacgcaggtatcaagtggttgaatggttcatgtatgggttgtgaattctgtgaacaaggtgctgaaccaaactgtcctaaggccgacttgagtggttacacccacgacggttccttccaacagtatgctactgctgacgctattcaagctgcacacatctccaaggaaaccgacttggctggtgttgctccaatcttgtgtgcaggtgtcactgtctacaaggctttaaagactgcagaccttagagcaggtgaatgggtttgtatttccggtgcagctggtggtttaggttctcttgctattcaatatgcaaaggctatgggtctgagagttgttggtattgacggtggtgacgaaaagaaggaattgtgtaaatcccttggtgctgaagcatttattgatttcacaaagaccaaggatatcgtcaaggctgtccaagaggcaaccaatggtggtccacatggtgtcatcaatgtctctgtctctgaagctgcaatttctcaatcttgtgaatacgttagacctctaggtaaggttgttcttgttggtttaccagcaggcgcacaagtcaaaactggtgtctttgaagccgttgtcaagtctattgaaattaagggttcttatgtcggtaacagaaaggataccgccgaagcacttgacttctacactagaggcttggtcaagtctccattcaagattgtcggtttatccgaattgccaaaagtctttgaactcatggaacagggtaagattttaggtagaatggtcttagacacctccaaataa

SEQ ID NO: 106 - protein, 350 aa, Issatchenkia orientalis
MSYEIPQTQKACVFYENGGPITYKDIPVPKPKPTEILVKVLYSGVCHTDLHAWKGDWPLATKLPLVGGHEGAGVVVAKGENVTSFEIGDYAGIKWLNGSCMGCEFCEQGAEPNCPKADLSGYTHDGSFQQYATADAIQAAHISKETDLAGVAPILCAGVTVYKALKTADLRAGEWVCISGAAGGLGSLAIQYAKAMGLRVVGIDGGDEKKELCKSLGAEAFIDFTKTKDIVKAVQEATNGGPHGVINVSVSEAAISQSCEYVRPLGKVVLVGLPAGAQVKTGVFEAVVKSIEIKGSYVGNRKDTAEALDFYTRGLVKSPFKIVGLSELPKVFELMEQGKILGRMVLDTSK

SEQ ID NO: 107 - DNA, 1131 bp, Issatchenkia orientalis
atgtttgcatcaaccttcagaagtcaagctgtaagagctgcaagatttactagattccaatccacttttgccattcctgagaagcaaatgggtgttatctttgaaactcatggtggtcctttacaatacaaggaaattccagttccaaaaccaaaaccaactgaaattttaatcaatgttaaatactctggtgtctgccataccgatttacacgcatggaaaggtgactggccattaccagcaaagttacccctagttggtggtcacgaaggtgcgggcattgttgttgcgaaaggttctgcagttaccaactttgagattggcgattatgctggtattaagtggttaaacggttcatgtatgtcatgtgaattctgtgaacaaggtgatgaatctaactgtgaacatgccgatttgagtggttatactcatgatggttctttccaacaatatgccactgctgacgctattcaagctgcaaagatcccaaagggtaccgacttatctgaagttgcgccaattttatgtgctggtgttactgtctataaagctttgaaaactgctgatttaagagcaggtcaatgggttgcgatttctggtgccgctggtggtctaggttctcttgctgtccaatatgcaaaggcaatgggtctaagagttttaggtatcgatggtggtgaaggtaaaaaggaactttttgaacaatgtggtggtgatgtgtttatcgatttcaccagatacccaagagatgcacctgaaaagatggttgctgatattaaggctgcaactaacggtttgggtccacacggtgttatcaatgtctctgtctccccagctgctatctctcaatcatgtgactatgttagagcaactggtaaggttgtccttgtcggtatgccatctggtgctgtctgtaagtctgatgtcttcactcatgttgttaaatccttacaaattaaaggttcttatgttggtaacagagcagataccagagaagctttggaattctttaatgaaggtaaggtcagatctccaatcaaggttgtcccattatctactttacctgaaatttacgaattgatggagcaaggtaagattttaggtagatacgttgttgatacttctaaataa

SEQ ID NO: 108 - protein, 376 aa, Issatchenkia orientalis
MFASTFRSQAVRAARFTRFQSTFAIPEKQMGVIFETHGGPLQYKEIPVPKPKPTEILINVKYSGVCHTDLHAWKGDWPLPAKLPLVGGHEGAGIVVAKGSAVTNFEIGDYAGIKWLNGSCMSCEFCEQGDESNCEHADLSGYTHDGSFQQYATADAIQAAKIPKGTDLSEVAPILCAGVTVYKALKTADLRAGQWVAISGAAGGLGSLAVQYAKAMGLRVLGIDGGEGKKELFEQCGGDVFIDFTRYPRDAPEKMVADIKAATNGLGPHGVINVSVSPAAISQSCDYVRATGKVVLVGMPSGAVCKSDVFTHVVKSLQIKGSYVGNRADTREALEFFNEGKVRSPIKVVPLSTLPEIYELMEQGKILGRYVVDTSK

SEQ ID NO: 109 - DNA, 1134 bp, Issatchenkia orientalis
atgttatccaagaccatcactgctgcattgaggggcaatacaactcgtactgcattcagaatcaatgccattagaagtttagcgatcccagctattccagagacacaaaagggtgttatcttttatgagaacggaggtgaactattttacaaggacattccagttccaaagccaaagccaaatgagattttggtgaatgtcaagtattctggtgtttgtcataccgatttacacgcatggaaaggtgactggcctttggcgaccaagttgccattggttggtggacatgaaggtgccggagttgttgttgctaagggggacaatgtcaccaactttgaaattggcgattatgccggtatcaagtggttgaatggttcatgtatggggtgtgaattttgccaacaaggtgcagagccaaactgtccacaggccgacttgagtggttacacccatgacgggtcctttcaacaatatgccactgccgatgctgttcaggcagccaagattcctcagggcactgatttggctcaagttgcgccaattttatgtgcaggtattactgtctataaggctttaaagactgcagaattaagaccaggtcaatgggttgccatttctggtgctgctggaggtttaggttctcttgctgttcaatatgccaaggccatgggtttgagagttttgggtattgatggtggtgaggagaagggcaagtttgcaaagtctcttggagctgaagttttcattgatttcaccaaatccaaggacattgtcaaggatatccaagaggccaccaatggtggtccacatggtgtcattaatgtttctgtttctccagctgctatttctcaaagtacccagtatgtcagaaccttgggtaaggttgtccttgttggattaccagcgcatgctgtatgcgagtcttcggttttcgaccatgttgtcaagtcgattcaaattagaggctcttatgttggtaacagggaagatactagtgaggctattgattttttcaccaggggtttagtgaagtcaccaattaagattgttggtttgagtgagttgccaaagatctatgaattgatggagcaaggtaagattttaggcagatatgttgttgacacttcgaaatga

SEQ ID NO: 110 - protein, 377 aa, Issatchenkia orientalis
MLSKTITAALRGNTTRTAFRINAIRSLAIPAIPETQKGVIFYENGGELFYKDIPVPKPKPNEILVNVKYSGVCHTDLHAWKGDWPLATKLPLVGGHEGAGVVVAKGDNVTNFEIGDYAGIKWLNGSCMGCEFCQQGAEPNCPQADLSGYTHDGSFQQYATADAVQAAKIPQGTDLAQVAPILCAGITVYKALKTAELRPGQWVAISGAAGGLGSLAVQYAKAMGLRVLGIDGGEEKGKFAKSLGAEVFIDFTKSKDIVKDIQEATNGGPHGVINVSVSPAAISQSTQYVRTLGKVVLVGLPAHAVCESSVFDHVVKSIQIRGSYVGNREDTSEAIDFFTRGLVKSPIKIVGLSELPKIYELMEQGKILGRYVVDTSK

SEQ ID NO: 111 - DNA, 1347 bp, Issatchenkia orientalis
atgtctccttcacaaattaacgttgacaacttatctaattggactgaagaattcaaatctgacgccaagactcaaatcgggggttctgtattgcaacattccaacattgatgaggtcttgattaacagagatgcagaaatcgccaacaagcatatcttcaaccacaagattgaaattgaaggtctacctgtcatggatcagaaggcttctggtagatgttggttgtttgcatcgactaacttgatgcgtgttactgcaatgaagaaatacaatttgaaggaaatcaagctttccccatcgtatttgtttttctatgacaaattggaaagagcaaactatttccttgaacaaatcatcgacactcataaggaaccaatcgattcaagattggttcaatatttcctgaccaatccagttgaagatggtggtcaattcaccatgatggcacaaattgctaccaaatacggtgttgttcctgatcaagtctacccagattctttcaacacaaccacttcgaggattatgaacagattagtcaaccacagattacgttcttatgcaatgactttacgtaacgctctagatgaaggtaaagatgtaatgtccttgaagaatgagatgcaaaaagaaatttatcgtttgctaacaatgttccttggtaacccaccaaagccaaacgaagagtttgtctgggaattcaccgataaagatggtaaatatgaatctattaaaactacaccattaaaatatgcaactgaagttttggatttccatgctccagaatatgtttccttgttaaatgacccaagaaataagtataacaagatggttcaagttgaaagattaggtaatgttgctggtggcgaaccagttgcatacttaaacttagaaattgaaaagttatctcaagctgttgttaacagaatcaaaaataacaaaccagttttctttggtaccgatacacctaaatttatggataaaagtagaggtattatggatatcaatttatgggactatgagttattaggttatgatgtccgtaccatgtcaaagaaggaaagagttgtttttggtgattctttaatgacccacgctatgttgattactgcagtgcacgttgatgaaaatggcaaacctgtcagatacagagtcgaaaacagttggggtaccaagagtggtcaagaaggttattacacaatgacccaagaatattttgaagagtacgtttatcaagtagtcattgaaaagagtgaatttgctgccctaaacctcgatgtttccattctggaggataaagaaccagtcgtcttgccaccttatgaccctatgggtgcacttgctttataa

SEQ ID NO: 112 - protein, 448 aa, Issatchenkia orientalis
MSPSQINVDNLSNWTEEFKSDAKTQIGGSVLQHSNIDEVLINRDAEIANKHIFNHKIEIEGLPVMDQKASGRCWLFASTNLMRVTAMKKYNLKEIKLSPSYLFFYDKLERANYFLEQIIDTHKEPIDSRLVQYFLTNPVEDGGQFTMMAQIATKYGVVPDQVYPDSFNTTTSRIMNRLVNHRLRSYAMTLRNALDEGKDVMSLKNEMQKEIYRLLTMFLGNPPKPNEEFVWEFTDKDGKYESIKTTPLKYATEVLDFHAPEYVSLLNDPRNKYNKMVQVERLGNVAGGEPVAYLNLEIEKLSQAVVNRIKNNKPVFFGTDTPKFMDKSRGIMDINLWDYELLGYDVRTMSKKERVVFGDSLMTHAMLITAVHVDENGKPVRYRVENSWGTKSGQEGYYTMTQEYFEEYVYQVVIEKSEFAALNLDVSILEDKEPVVLPPYDPMGALAL

SEQ ID NO: 113 - DNA, 1737 bp, Issatchenkia orientalis
atgttactcagatcactaaactcttctgctcgttgtgtcaaacaaacaaccagaacaaaggttaggtatctcagccacgtcagtggtgcaagcatggcgaaacctacattgaagaacaactcgagagaatccaacaaatccagaaactatctaattgctgctgtgacagcattggctgtatcaacctcaattggagttgccgtacatgtgaaggaccccttgtataacgatgctaccggcagtgattctccgagaagtatatctgttgacgagtttgtcaagcataattcacaaaacgactgttggattgcaatcaatggcaaggtttatgatttcactgattttattccaaaccatccaggtggggtacctccattagttaatcatgctggttatgatggtactaaactttatgagaaattgcatccaaaaggtacaattgagaaattcttgccaaaggataagtttctgggtgtgttagatggtgaagcgccaaaattggaagcagactatttggtggacgatgatgaacaagagagactggattatttgaacaacttacctcctttgtcatctattcagaatgtttatgatttcgaatacttggccaagaagattttacctaaagatgcctgggcatattattcttgtggtgccgatgatgaaatcacaatgagagaaaaccattatgcttatcaaagagtttatttcagaccaagaatttgtgttgatgtcaaggaagttgatacttcttatgaaatgttaggcactaaaacctctgttcctttttatgtatctgccaccgctttggctaaattaggccatcctgatggtgaatgctcaattgctagaggcgctggtaaggaaggtgtcgttcaaatgatttcgaccctttcctcaatgtcattagatgaaattgccgctgctagaattccaggtgcaacccaatggttccaattatacattaatgaggatagaaatgtcgctaaaggtctggtcaaacatgcagaagacttgggtatgaaggctatctttataactgttgatgctccttctctaggtaacagagaaaaggataaaagattaaagtttgttaatgacaccgatgtcgatttgggtgattccgcagatcgaaacagtggtgcttcaaaggcactatcttcgttcattgatgcttctgtctcttggaatgacgtcaaagcggtcaagtcgtggactaaattgcctgtcttagttaaaggtgttcaaacagttgaagacgttattgaagcttacgatgctggttgtcaaggtgttgttttgtcaaaccacggtggtaggcaactagatactgctcctcctccaatcgaattattagctgaaactgttccaactttgaagagattgggtaaattaagaccagattttgaaattttaattgacggtggtgtcaaaagaggtaccgatattttgaaagcagtcgcaatcggtggccaagatgtcagagtttcagttggtatgggtagacctttcttatatgccaactcttgctatggtgaagcaggtgttagaaaattaattcaaaatctaaaggatgaattagaaatggatatgagattgttgggtgtcactaaaatggaccagctatcttcgaaacatgtcgatactaaacgtttgattggtagagatgcgatcaactatttgtatgataatgtatacagcccaatcgaaaccgttaaattcaacaatgaagattga

SEQ ID NO: 114 - protein, 578 aa, Issatchenkia orientalis
MLLRSLNSSARCVKQTTRTKVRYLSHVSGASMAKPTLKNNSRESNKSRNYLIAAVTALAVSTSIGVAVHVKDPLYNDATGSDSPRSISVDEFVKHNSQNDCWIAINGKVYDFTDFIPNHPGGVPPLVNHAGYDGTKLYEKLHPKGTIEKFLPKDKFLGVLDGEAPKLEADYLVDDDEQERLDYLNNLPPLSSIQNVYDFEYLAKKILPKDAWAYYSCGADDEITMRENHYAYQRVYFRPRICVDVKEVDTSYEMLGTKTSVPFYVSATALAKLGHPDGECSIARGAGKEGVVQMISTLSSMSLDEIAAARIPGATQWFQLYINEDRNVAKGLVKHAEDLGMKAIFITVDAPSLGNREKDKRLKFVNDTDVDLGDSADRNSGASKALSSFIDASVSWNDVKAVKSWTKLPVLVKGVQTVEDVIEAYDAGCQGVVLSNHGGRQLDTAPPPIELLAETVPTLKRLGKLRPDFEILIDGGVKRGTDILKAVAIGGQDVRVSVGMGRPFLYANSCYGEAGVRKLIQNLKDELEMDMRLLGVTKMDQLSSKHVDTKRLIGRDAINYLYDNVYSPIETVKFNNED

SEQ ID NO: 115 - DNA, 1698 bp, Issatchenkia orientalis
  misc_feature (941)..(941): N= A, C, T, or G
  misc_feature (943)..(943): N= A, C, T, or G
atgttaagatcccagttcaaaaacattttgaaaaatgttaacaagaaccattctctaaggagaacttttacttccagcacctcaaaggctggaaaaaatgcttcatacaatgccaagattatatctgcaaccgtggcctcgattgttgcagcagctggctcttatatgttggtccagccttcactagctaatgatgaggcacagtctgctaatccaactaggaagatctctgttgacgaatttgttaaacacaaccatgccgatgattgttggatcactgttaacggtaacgtctatgacttgactgatttcatttcaatgcatccaggtggtactaccccattgattcaaaatgcaggtcacgacgcaactgaaatttacaacaagattcatccaaagggtacaatcgagaacttcttaccaaaggaaaagcaattgggtgttttggatggtgaagctcctaaaatcgaagttgtgcttgacgaaaaggagaaacacagattggagttgttgaatcatctccctgctctttccagaattcaaaacatttatgatttcgaacatattgcttctagagttttgagcgaccaagcatggaactactattcatgtggtgccgaagatgaaatcaccttgagggaaaatcattatgcttaccaaagaatctactttaagccaaaatgttgtgtcaatgttgcagaagttgatacctctcatgaaattttaggtacaaaagcttctgttcctttctacgtttccgcagccgcttctgcaaagttggggcacgaggatggtgaatgttccattgctagaggtgcaggtaaggaaggcgttattcaaatgatttcttccttctcttccaactctttggaggaaattgcagaatccagaattcctggtgcaacacaatggtttcaattatacgttaatgaagacaaggntnttgtgaagaagactttaaaaagggccgaaaacttgggtatgaaggccatctttgtcactgtggacgctgctagtagaggtaatagagaaaaagacattacaatgagaattaccgaagatacagatgagttaatagacgattcttctgttagagctggttctacctctggtgcattgccagctttcattgacaagaggctgacttgggatgaagttaaggatatcatttcatggaccaagttaccagttttgctgaagggtgttcaaagaactgatgatattgagaaggcaattgatattggttgtaagggtgttgtcttgtccaatcatggtggtagacaattagatacttctcctcctccaatagaagttatggctgaatctgttccaatcctaaagcaaaagggtaaactggatccaaatttcagtattttcgttgatggtggtgttagaagaggtacagatattttgaaagctttggctattggtggcagagactgtaaagttgctgttggtctgggtagacctttcctttatgcaaatactggttatggtgaaaagggtgtcagaaaggccgtgcaaattctaagagaagaattaaaggctgacatgagaatgttgggcgttacctctttgaacgagctagacgactcttacattgacaccagaagattactaggtagagatgctgttaaccacatatacaacaacaactactacccaatgtctaagattcaattcaaaaacgaaaaataa

SEQ ID NO: 116 - protein, 565 aa, Issatchenkia orientalis
  MISC_FEATURE (314)..(314): Xaa = Asp, Gly, Ala, or Val
  MISC_FEATURE (315)..(315): Xaa = Ile, Val, Leu, or Phe
MLRSQFKNILKNVNKNHSLRRTFTSSTSKAGKNASYNAKIISATVASIVAAAGSYMLVQPSLANDEAQSANPTRKISVDEFVKHNHADDCWITVNGNVYDLTDFISMHPGGTTPLIQNAGHDATEIYNKIHPKGTIENFLPKEKQLGVLDGEAPKIEVVLDEKEKHRLELLNHLPALSRIQNIYDFEHIASRVLSDQAWNYYSCGAEDEITLRENHYAYQRIYFKPKCCVNVAEVDTSHEILGTKASVPFYVSAAASAKLGHEDGECSIARGAGKEGVIQMISSFSSNSLEEIAESRIPGATQWFQLYVNEDKXXVKKTLKRAENLGMKAIFVTVDAASRGNREKDITMRITEDTDELIDDSSVRAGSTSGALPAFIDKRLTWDEVKDIISWTKLPVLLKGVQRTDDIEKAIDIGCKGVVLSNHGGRQLDTSPPPIEVMAESVPILKQKGKLDPNFSIFVDGGVRRGTDILKALAIGGRDCKVAVGLGRPFLYANTGYGEKGVRKAVQILREELKADMRMLGVTSLNELDDSYIDTRRLLGRDAVNHIYNNNYYPMSKIQFKNEK

SEQ ID NO: 117 - DNA, 1167 bp, Issatchenkia orientalis
atggtgtcccctgctgaaagattatctactattgcgtccacaatcaagccaaacagaaaagattctacatcattacaaccagaagactatccggaacatccgttcaaggtgacggttgttggttccggtaactgggggtgtacaattgccaaggttatagcggaaaacaccgttgagagacctcgtcaatttcaaagagatgttaatatgtgggtctatgaagaattgattgaaggcgaaaagttgactgaaatcataaataccaaacacgaaaacgtcaagtacttgccaggtatcaagttgccagttaacgttgttgcagttccagacattgttgaggcttgtgcaggctcagacttgattgtctttaatattcctcaccaatttttaccaagaattttatcccaattaaagggtaaggtgaatccaaaggctagagcaatttcttgtttgaaaggtttggatgtcaatcctaatggatgtaagttgctctccactgttattactgaagagttgggtatttattgtggtgccttatcaggtgctaatttagctcctgaagttgcacaatgtaaatggtcggaaacaactgttgcatatacaattccggacgatttcagaggtaaaggcaaggatattgaccatcaaattctaaagagtttgttccatagaccttatttccatgttcgtgttattagtgatgttgcaggtatttccattgccggtgcactcaagaatgtcgttgctatggctgctggatttgtcgaaggtttaggttggggtgataatgcaaaggctgcagtcatgagaataggtttggtggaaaccattcaatttgccaagacttttttcgatggctgtcatgctgcaacctttactcatgaatctgcaggtgttgccgacctaatcactacctgtgccggcggccgtaacgttagagttggtagatatatggcacaacattctgtctctgcaacggaggctgaagaaaagttgttgaatggccaatcctgtcaaggtatccacacaactagggaagtttacgagttcctctccaacatgggcaggacagatgagttcccactatttaccaccacctaccgtatcatctacgaaaacttcccaattgagaagctgccagaatgccttgaacctgtggaagattaa

SEQ ID NO: 118 - protein, 388 aa, Issatchenkia orientalis
MVSPAERLSTIASTIKPNRKDSTSLQPEDYPEHPFKVTVVGSGNWGCTIAKVIAENTVERPRQFQRDVNMWVYEELIEGEKLTEIINTKHENVKYLPGIKLPVNVVAVPDIVEACAGSDLIVFNIPHQFLPRILSQLKGKVNPKARAISCLKGLDVNPNGCKLLSTVITEELGIYCGALSGANLAPEVAQCKWSETTVAYTIPDDFRGKGKDIDHQILKSLFHRPYFHVRVISDVAGISIAGALKNVVAMAAGFVEGLGWGDNAKAAVMRIGLVETIQFAKTFFDGCHAATFTHESAGVADLITTCAGGRNVRVGRYMAQHSVSATEAEEKLLNGQSCQGIHTTREVYEFLSNMGRTDEFPLFTTTYRIIYENFPIEKLPECLEPVED

SEQ ID NO: 119 - DNA, 1566 bp, Issatchenkia orientalis
atgttgtccctctctaaacagtcaagaaactttttcaaattgaactatttttcagtcacccaaatagcaaaaatgtctgcaacttccgtcactttcccaattatcaacgaaacttaccaacagccaaccgggcttttcatcaacaatgaatttgttagtgcaaagtcaggtaagacttttgatgttaacaccccaattgatgagtctctcatttgtaaagtccaacaggccgatgctgaagatgttgaaattgccgttcaagcagcatctaaagcttacaagacttggagatttacaccgccaaatgaaagaggcagatacttgaacaaattggccgatttgatggacgaaaagagagacttacttgccaaaattgaatcccttgataatggtaaggccttacattgtgcaaaattcgatgtcaatcttgtcattgaatatttcagatactgtgcaggttactgtgataaaatcgatggtagaacaattacaaccgatgtagaacattttacctacactagaaaggaacctttaggtgtctgtggtgcaattacaccttggaacttcccattgctgatgtttgcttggaaaatcggcccggctttagcaaccggtaataccattatcttgaagcctgccagtgcaacacctctatcaaacctctttacttgtaccttgatcaaggaggcgggcattccagccggtgttgttaatgttgttccaggttccggtagaggctgtggtaactccattttacaacatcctaaaattaagaaggttgcgtttaccggatctacagaagttggtaaaactgttatgaaggaatgtgctaattccatcaaaaaggttactctcgaattgggtggtaagtctccaaacattgttttcaaagactgtaacgttgaacaaaccattcaaaatttgattactggtattttcttcaatggtggtgaagtctgttgtgctggttctagaatttacattgaagcaaccgatgagaaatggtatactgaattcttgaccaaattcaaggagactgttgaaaaattaaagattggtaacccatttgaagagggtgttttccaaggtgcacaaaccactccagatcaattccaaactgtcttggactacatcaccgctgctaacgaatccagcttgaaactattaactggtggtaaaagaattggcaataagggatactttgttgagccaactatcttctacgatgttcctcaaaattccaagttaactcaagaagaaatctttggtccagttgctgttgttttacctttcaagtccactgaagaattgattgaaaaggcaaatgattccgattttggcttaggttccggtattcacactgaagatttcaacaaggcaatttgggtttccgaaaggcttgaagcaggttctgtttggatcaacacttacaatgatttccacccagctgctccattcggtggttacaaggaatccggtattggcagagaaatgggtattgaagctttcgacaactatactcaaaccaagttagttagagctagagttaacaagccagctttttag

SEQ ID NO: 120 - protein, 521 aa, Issatchenkia orientalis
MLSLSKQSRNFFKLNYFSVTQIAKMSATSVTFPIINETYQQPTGLFINNEFVSAKSGKTFDVNTPIDESLICKVQQADAEDVEIAVQAASKAYKTWRFTPPNERGRYLNKLADLMDEKRDLLAKIESLDNGKALHCAKFDVNLVIEYFRYCAGYCDKIDGRTITTDVEHFTYTRKEPLGVCGAITPWNFPLLMFAWKIGPALATGNTIILKPASATPLSNLFTCTLIKEAGIPAGVVNVVPGSGRGCGNSILQHPKIKKVAFTGSTEVGKTVMKECANSIKKVTLELGGKSPNIVFKDCNVEQTIQNLITGIFFNGGEVCCAGSRIYIEATDEKWYTEFLTKFKETVEKLKIGNPFEEGVFQGAQTTPDQFQTVLDYITAANESSLKLLTGGKRIGNKGYFVEPTIFYDVPQNSKLTQEEIFGPVAVVLPFKSTEELIEKANDSDFGLGSGIHTEDFNKAIWVSERLEAGSVWINTYNDFHPAAPFGGYKESGIGREMGIEAFDNYTQTKLVRARVNKPAF

SEQ ID NO: 121 - DNA, 1506 bp, Issatchenkia orientalis
atgtcagcactgttcagaaccattgagactccaaacggtaaaaccctggaacaaccactgggtctcttcatcgacaatgagtgggtgaaaacaaaccgtacttttgagaccattaatccgtccacaggtgaggcgatctgtcatgtttaccgtgctggggtccaggaggtgaacgacgctgtcgaagctgcaaatagagcatttagaaacgaatcttggtcaggtctaactggttctcaacgtggcgatttactgtatcgcatgtaccaagttatcaaaagagacgccgagagcattgcatcgattgagtccatggataatggtaaaccgtatgctgcagaatgcctagatggagatttaggtgaagctgctgacgttttcaaatattatgccggttgggccgacaagatcaccggtgaactcattggctcgagtgtattgggtaagaataagatgtgttatgtcgagcctacaccactgggtgccgttggcggtatagtcccttggaatttcccgtttaccatgatggcatggaaaattgccccggcactggcgacgggttgtacagtggttatgaagtcaagtgaagtcacaccgttgacggcattatggtatggcaagattgcacttgaagtgggtctacctaaaggtgtacttaacatcctctccggttttggatcggatgttggatcggccatggcttcacatccaaagttggctaagatagcgttcactggctcaactgcaactggtaaaaaaatcatggaagcagcaggtggttccaacttgaaaaaggttacactagagtgtggtggtaaatctccttacattgtttttgatgatgctgacttagaattggcagtagaatgggcatattggggtatttggtataacaaaggtgaggtttgtacttcaacttcgagatttttgattcaggaagacatttacgataagtttgttgagagttttgttgagttgaccaagacgagagcaatcactgctgatccgtttgatgatagatgcactatcgggcctttggtttctagctcacagtacgaaaaagtcaaaaagtacgttgaaataggtaaaaatgaaggagcaaagctactaactggcaaattcatcgacgggccaggctatttctgtgagccatttatcttcagtgaatgcactgacgatatgacaatcatgaaagaggaaatctttggccctgttgtggggattactaaattctcaacggttaaagaggcgatcgagagagccaatgctacgacttacggtttaggagctgcgttgttttcctctaacataacaaaggcacattctgtggctgccaagttggaggctggaatggtgtggatcaattctaatggtgattctgatatccacattccatttggtggttccaaaatgagtggtataggtagggagttggggccatacgcactagacttgtttactgagaaaaaggcagttcatgtcaacttatcgcttccggtcaagtga

SEQ ID NO: 122 - protein, 501 aa, Issatchenkia orientalis
MSALFRTIETPNGKTLEQPLGLFIDNEWVKTNRTFETINPSTGEAICHVYRAGVQEVNDAVEAANRAFRNESWSGLTGSQRGDLLYRMYQVIKRDAESIASIESMDNGKPYAAECLDGDLGEAADVFKYYAGWADKITGELIGSSVLGKNKMCYVEPTPLGAVGGIVPWNFPFTMMAWKIAPALATGCTVVMKSSEVTPLTALWYGKIALEVGLPKGVLNILSGFGSDVGSAMASHPKLAKIAFTGSTATGKKIMEAAGGSNLKKVTLECGGKSPYIVFDDADLELAVEWAYWGIWYNKGEVCTSTSRFLIQEDIYDKFVESFVELTKTRAITADPFDDRCTIGPLVSSSQYEKVKKYVEIGKNEGAKLLTGKFIDGPGYFCEPFIFSECTDDMTIMKEEIFGPVVGITKFSTVKEAIERANATTYGLGAALFSSNITKAHSVAAKLEAGMVWINSNGDSDIHIPFGGSKMSGIGRELGPYALDLFTEKKAVHVNLSLPVK

SEQ ID NO: 123 - DNA, 1506 bp, Issatchenkia orientalis
atggctcttccacttgcaactacaatctccttatcaagcggcaaaacattagaacagccaattggtttatttattgataatgaatttgtcaatccaatttctgtttctaatgcaagaacactaacaaccttcaacccaagcacaggtgagccaataaccgatgttcattgtgcctcagctgcagatgttgatgttgcggtaaatgctgcaaacaaggcaatggaaacatggaaagacattgatcctactgttcgtgtcgaacttttactaaaattggccagcttagttgacgagcattcccaagcaattgctgaaattgaagcactagactcgggtaaaccattgtactcgaatgcactggcggatgttcaatcggttgctgagtacttaaggtactgtgccggttgggcggataaattacacggtacgcaaattccaataaactctaaggtaatggctattacaaaacgtgtacccttagttgtcggctgcatcattccatggaactacccaatttcaatggcctcctggaagttctgtccagcattggctgccggatgtactattgtaatgaagtcaagtgagataaccccgttatcgttactttattttgcgaatttggtcaaattagcaggtttccctaagggtgtttttaatgtcgtctctggatttggtgatgatgttggctcagcgctttcaaatcacccaaagttgggtaagattgcatttacaggctcgaccttgaccgggcaaaaggtgatggcggatgctgccagatcaaatttgaaaagcgtatctttggaatgtggtggtaaatctccacttattgtcttcgaagatgcagaattggatgaatgcgttaaatgggcaagttttggtgtcatgtataacaccggacaaaattgtactgccaattctcgtattattgtgcatgataaggtttatgatcaatttatcgaaaagttcctgtctcaactcaaggaagattggaaaatgggagatgtcatgaatgaaaagactacattgggaccacttgtcagccaacaacaatatgagcgtgttcagtcgtatattgatataggtgtcaaagaaggggctacactgattcaaccgcttaaggagagcactccatcaaatggattctacatctctcctactgtttttactaacgttaaggaagatatgagaattgttaaggaggaaatatttggtcctgtcgtaactatctccaaattctcaactgaggaagaggcaatttcaaaggcgaatgatacaatttatggcttagctgcaatgttatttactactaattttgaacgtgccaacagagttgctgataagctggaagctggcagtgtgtacattaatagctctaacaacgagagtaccaaagttccatttggaggaatgaagatgagtggtattggaagagagttggggcaagaagcatttaatttgtacactgttacaaagagtatttattatagttatggtgctaagctttaa

SEQ ID NO: 124 - protein, 501 aa, Issatchenkia orientalis
MALPLATTISLSSGKTLEQPIGLFIDNEFVNPISVSNARTLTTFNPSTGEPITDVHCASAADVDVAVNAANKAMETWKDIDPTVRVELLLKLASLVDEHSQAIAEIEALDSGKPLYSNALADVQSVAEYLRYCAGWADKLHGTQIPINSKVMAITKRVPLVVGCIIPWNYPISMASWKFCPALAAGCTIVMKSSEITPLSLLYFANLVKLAGFPKGVFNVVSGFGDDVGSALSNHPKLGKIAFTGSTLTGQKVMADAARSNLKSVSLECGGKSPLIVFEDAELDECVKWASFGVMYNTGQNCTANSRIIVHDKVYDQFIEKFLSQLKEDWKMGDVMNEKTTLGPLVSQQQYERVQSYIDIGVKEGATLIQPLKESTPSNGFYISPTVFTNVKEDMRIVKEEIFGPVVTISKFSTEEEAISKANDTIYGLAAMLFTTNFERANRVADKLEAGSVYINSSNNESTKVPFGGMKMSGIGRELGQEAFNLYTVTKSIYYSYGAKL

SEQ ID NO: 125 - DNA, 1544 bp, Issatchenkia orientalis
  misc_feature (1319)..(1319): N= A, C, G, OR T
atgatgggcgcaactacagcaaaaattagtattccaaatggtaacaaatacgagcaacctacaggtttgttcatcaatggtgagtttgttgcttcaagtgatggtaaaactgcagaagttgagaatccaggcaatggaaacattgtatgttctgtccacttagcttctattgaggatattaataccgccgtagaagctgctgaagatgcatttttcaaaaggtgggccaccatcagtggtaaagccaagggagaatacttgagtaagattgccgatctaatcgttaaatattctgatcaattggcagatctagaggctattgaatcaggtaagccaaaggacaccaatgcaatctttgatgttttacattcggctgatgttttcagatactatgctggcaaggctgtcactgcacaaagcggcaagactatcgagtccgaactctccaaatttacatacacagtttacgagccctatggtgtttgtgccgctatcatcgcatggaacttcccaatgagcacatttgcgtggaaagttgcggcatgtttagctgctggtaatacaatggttgtcaaaacttccgagctgactccgttatctgcattgttcatgtgtaagattttccaagaagcagatctacctgctggagttataaacgtcacatgtggtttaggttctgttgcaggtgttcgattgagtgaacatgaaaaggttcagaaaatttcgtttactggctccactggcgttggtaagttgatccaagaatccgcagcaaagtctaacttaaagtattgtacgcttgaatgtggtggtaagtctccgttagtgatttacgaggatgcagatcttgagcaagcagtgaagtgggctgcctttggtatttttttcaacaaaggtgaaatttgcacagcctcttccagaatatatgttcaagaatcagtctatgacaaatttttgactatgtacaaggatcatgtggaagaagcctatgttcaaggagaacagtttgccactggtgttaacgttgggcctactgtctgcaaagcccaacaagagaaaatactggcctacattgaaagtgccaagcaagaaggtggtagaattatcactggtggtaaaataccatcttacacgaacaaaaatggttactatctcgaaccaacaattattgcagattgtaaccaggatatgaaggtagtcagggaagagattttcggaccagtcgttactgtatccaaattcactagtgatgaagaagccatcaaattaagcaatgattccgaatatggcttggcagcatatttattcactystsrasnassrgttyrgytaaaatyrththraaggacctcgttagatctcagaattatatcagaaaagtgcaaagcggacaggtctttgtcaacttcacctttgcggctgatttcaggttgccatttggcggatataagatgagtggtaacggaagagagcttggtgatgaaggactgagtgctttccagcaagtcaaagcagtacacattaatctcactgggaagttgtaa

SEQ ID NO: 126 - protein, 503 aa, Issatchenkia orientalis
MMGATTAKISIPNGNKYEQPTGLFINGEFVASSDGKTAEVENPGNGNIVCSVHLASIEDINTAVEAAEDAFFKRWATISGKAKGEYLSKIADLIVKYSDQLADLEAIESGKPKDTNAIFDVLHSADVFRYYAGKAVTAQSGKTIESELSKFTYTVYEPYGVCAAIIAWNFPMSTFAWKVAACLAAGNTMVVKTSELTPLSALFMCKIFQEADLPAGVINVTCGLGSVAGVRLSEHEKVQKISFTGSTGVGKLIQESAAKSNLKYCTLECGGKSPLVIYEDADLEQAVKWAAFGIFFNKGEICTASSRIYVQESVYDKFLTMYKDHVEEAYVQGEQFATGVNVGPTVCKAQQEKILAYIESAKQEGGRIITGGKIPSYTNKNGYYLEPTIIADCNQDMKVVREEIFGPVVTVSKFTSDEEAIKLSNDSEYGLAAYLFTKDLVRSQNYIRKVQSGQVFVNFTFAADFRLPFGGYKMSGNGRELGDEGLSAFQQVKAVHINLTGKL

SEQ ID NO: 127 - DNA, 1716 bp, Issatchenkia orientalis
  misc_feature (655)..(655): n is a, c, g, or t
atggctccaactgctgttgatatccataacgagtacaaacagaatgtttccaacgaacaggaaattcctttcaacaaaactgaaagaaagtcatcgattgcatctaaattaggactgaatccagacgctaagattcactacaattctgctgttcctatattatacgaagatggtttaaaggaaaaaggtacaaccatttcctcttctggtgcattgattgcattctctggttccaaaacaggtagatctccaaaggacaaaagaattgtcgatgaagagacttcaacagacaacatctggtggggtccagtcaataagaaggttgatgaaaacacttggaatatctcgaaatctagagcgattgattatttgagaacaagagagaaggtttacattatcgatgcttttgctggttgggatccaagatacagaattaaggttagaattgtctgtgctagagcttaccatgctttgttcatgaagaatatgttaattagaccaacaacggaagaattaaagaactttggtgagcctgatttcaccatttggaatgcaggtcaattccctgctaatgtttacactaagggtatgacttcttcaacttctgttgaaataaatttcaagtctthrysgymtthrsrsrthrsrvagtasnhyssratggaaatggttatcctaggtactgaatacgcaggtgaaatgaagaaaggtatctttaccgttatgttctacttgatgccaatcagacacaaggttttaactttacactcttctgcaaatcaaggtaaaaaggatggtgatgtcacattattctttggtttatctggtacaggtaaaacaaccttgtctgcagatcctcatagagaattgattggtgatgatgaacattgctggtctgatcatggtgttttcaacattgaaggtggatgttatgctaagtgtttggacttatctgctgaaagagaacctgagattttcaatgcaattaggtttggatctgtcttggagaatgttgtctatgatccagttgatagaactgttgactattccgctgctaatgtcactgaaaatactagatgtgcttatcctatcgactttattccttctgctaagatcccatgtctggcagattctcatccaaagaatattgttcttttaacttgtgatgcaagaggtgttttgccacctgtctccaagctaactaatgcacaagtcatgtatcactttatctctggttacacctccaagatggcaggtaccgaagttggtgtcactgaaccagaagcaaccttctctgcatgttttggtcaacctttcttagttttacatccaatgaaatacgcacaacaactctctgataaaatggctgaacattcttccaccgcttggttattgaataccggttggactggtcaatcttatgttaaaggtggtaagagatgtccattgaagtatactagagcaattttagatgctattcactctggtgagcttgcaaaacaggaattcgaaacataccctactttcggtttacaagttccaaaaacttgtccaggtgtcccagaaagtgttctgaacccatctaaacactgggctactggtgaagctgatttcaaggctgaagtcactaacttggctaaattatttgctgagaactttgaaaagtattctgcagaatgtactgcagaagttgttgctgctggtcctgctttataa

SEQ ID NO: 128 - protein, 560 aa, Issatchenkia orientalis
MAPTAVDIHNEYKQNVSNEQEIPFNKTERKSSIASKLGLNPDAKIHYNSAVPILYEDGLKEKGTTISSSGALIAFSGSKTGRSPKDKRIVDEETSTDNIWWGPVNKKVDENTWNISKSRAIDYLRTREKVYIIDAFAGWDPRYRIKVRIVCARAYHALFMKNMLIRPTTEELKNFGEPDFTIWNAGQFPANVYTKGMTSSTSVEINFKSMEMVILGTEYAGEMKKGIFTVMFYLMPIRHKVLTLHSSANQGKKDGDVTLFFGLSGTGKTTLSADPHRELIGDDEHCWSDHGVFNIEGGCYAKCLDLSAEREPEIFNAIRFGSVLENVVYDPVDRTVDYSAANVTENTRCAYPIDFIPSAKIPCLADSHPKNIVLLTCDARGVLPPVSKLTNAQVMYHFISGYTSKMAGTEVGVTEPEATFSACFGQPFLVLHPMKYAQQLSDKMAEHSSTAWLLNTGWTGQSYVKGGKRCPLKYTRAILDAIHSGELAKQEFETYPTFGLQVPKTCPGVPESVLNPSKHWATGEADFKAEVTNLAKLFAENFEKYSAECTAEVVAAGPAL

SEQ ID NO: 129 - protein, 267 aa, Saccharomyces cerevisiae
MSQGRKAAERLAKKTVLITGASAGIGKATALEYLEASNGDMKLILAARRLEKLEELKKTIDQEFPNAKVHVAQLDITQAEKIKPFIENLPQEFKDIDILVNNAGKALGSDRVGQIATEDIQDVFDTNVTALINITQAVLPIFQAKNSGDIVNLGSIAGRDAYPTGSIYCASKFAVGAFTDSLRKELINTKIRVILIAPGLVETEFSLVRYRGNEEQAKNVYKDTTPLMADDVADLIVYATSRKQNTVIADTLIFPTNQASPHHIFRG

SEQ ID NO: 130 - DNA, 420 bp, Streptomyces avermitilis
atgttaagaaccatgttcaaatctaagattcacagagcaactgttactcaagcagatctccattatgttggttccgttactattgatgcagacttgttagacgcagcagacttgttgccaggtgaattggttcacatcgttgacattacgaacggtgctagattggaaacttacgtcattgaaggtgaacgtggttccggtgttgttggtatcaatggtgctgccgctcatttagttcatcctggtgatcttgttatcattatctcctatgcacaagtttcagatgcagaagcacgtgcattgcgtccaagagttgttcacgttgacagagacaatagagttgttgcgcttggtgcggatccagccgaaccagtcccaggttccgaccaagctagatccccacaagctgttactgcataa

SEQ ID NO: 131 - DNA, 384 bp, Clostridium acetobutylicum
atgcacttgaacatgttgaagtccaagatccacagagctaccgtcgttcaagcagacttgaactacgtcggttccatcaccatcgacagaaacttgatggacaaggcaaacatcttggaatacgaaaaggtcgagatcgcaaacatcaacaacggtgcaagattcgaaacctacgtcatcgctggtgaggctggttccggtatcatctgtttgaacggtgctgctgcaagatgtgcacaagcgggtgacaaggttatcatcatgtgttactgttccttgaccccagaagaagcttccgagcacagaccaaaggtcgttttcgtcaacgacgacaactccatctccaacgtcaccgaatacgagaagcacggcaccatcggttaa

SEQ ID NO: 132 - DNA, 354 bp, Helicobacter pylori
atgaccttcgagatgttgtactccaagatccacagagcaaccatcaccgacgcaaacttgaactacatcggctccatcaccatcgacgaggacttggctaagttggctaagttgagagagggtatgaaggtcgaaatcgtcgacgtcaacaacggcgagagattctccacctacgtcatcttgggtaagaagagaggtgaaatctgcgtcaacggtgcagcagccagaaaggtcgctatcggtgacgtcgtcatcatcttggcttacgcatccatgaacgaggacgagatcaacgctcacaagccatccatcgtcttggtcgacgaaaagaacgaaatcttggaaaagggttaa

SEQ ID NO: 133 - protein, 117 aa, Helicobacter pylori
MTFEMLYSKIHRATITDANLNYIGSITIDEDLAKLAKLREGMKVEIVDVNNGERFSTYVILGKKRGEICVNGAAARKVAIGDVVIILAYASMNEDEINAHKPSIVLVDEKNEILEKG

SEQ ID NO: 134 - DNA, 387 bp, Bacillus sp. TS25
atgtacagaaccatgatgaagtccaagttgcacagagcgaccgtcaccgaagcaaacttgaactacgtcggttccatcaccatcgaccaagacttgatggaagctgcagacatcttggaaaacgagaaggtccaaatcgtcaacaacaacaacggtgctagattcgaaacctacgtcatcgctggtccaagaggctccggcaccatctgtttgaacggtgcagcagcaagattggtccaaccaggtgacaccgttatcatcatctcctacgcaatgttggaagaagccgaggctagaaagcaccaacctgtcgtcgttttgttgaacccagacaacaccatccaagaattgatcagagaaacccacggtgctaccgctaccgtctaa

SEQ ID NO: 135 - protein, 128 aa, Bacillus sp. TS25
MYRTMMKSKLHRATVTEANLNYVGSITIDQDLMEAADILENEKVQIVNNNNGARFETYVIAGPRGSGTICLNGAAARLVQPGDTVIIISYAMLEEAEARKHQPVVVLLNPDNTIQELIRETHGATATV

SEQ ID NO: 136 - DNA, 411 bp, Corynebacterium glutamicum
atgttgagaaccatcttgggttccaaaatccacagagctaccgttacccaagcagacttggactacgttggttcagtcaccatcgatgcagacttggttcatgccgcaggtttgatcgaaggtgaaaaggttgccatcgtcgacatcaccaatggcgctagattggaaacctacgttatcgttggtgatgctggcaccggtaacatctgtatcaacggtgcagcagcacacttgatcaacccaggtgatttggttatcatcatgtcctacttgcaagctaccgatgcagaggccaaggcttacgaaccaaagatcgttcacgtcgacgcagacaacagaatcgttgctttgggtaacgacttggcagaagctttgcctggttccggtttgttgacctcaagatctatctaa

SEQ ID NO: 137 - protein, 136 aa, Corynebacterium glutamicum
MLRTILGSKIHRATVTQADLDYVGSVTIDADLVHAAGLIEGEKVAIVDITNGARLETYVIVGDAGTGNICINGAAAHLINPGDLVIIMSYLQATDAEAKAYEPKIVHVDADNRIVALGNDLAEALPGSGLLTSRSI

SEQ ID NO: 138 - DNA, 384 bp, Bacillus licheniformis
atgtacagaaccttgatgtccgctaagttgcacagagctagagtcaccgaagcaaacttgaactacgttggttccgtcaccatcgacgaggacttgttggacgcagtcggtatgatggcaaacgaaaaggtccaaatcgtcaacaacaacaacggtgctagattggaaacctacatcatccctggtgagagaggttccggtgtcgtctgtttgaacggtgctgcagctagattggtccaagttggtgacgtcgttatcatcgtttcctacgccatgatgtccgaagaagaagcaaagacccacaagccaaaggtcgctgttttgaacgaaagaaacgaaatcgaagagatgttgggtcaagaaccagctagaaccatcttgtaa

SEQ ID NO: 139 - protein, 127 aa, Bacillus licheniformis
MYRTLMSAKLHRARVTEANLNYVGSVTIDEDLLDAVGMMANEKVQIVNNNNGARLETYIIPGERGSGVVCLNGAAARLVQVGDVVIIVSYAMMSEEEAKTHKPKVAVLNERNEIEEMLGQEPARTIL

SEQ ID NO: 140 - DNA, 1356 bp, Streptomyces avermitilis
atgacaccacagccaaacccacaagtcggtgcagcagtcaaagctgcagatagagcacacgtcttccactcttggtctgcacaagaattgatcgatccattggctgttgctggtgcagagggttcctacttctgggattacgatggtagacgttaccttgacttcacctccggcttagtcttcaccaacatcggttaccaacacccaaaggttgtcgcagctatccaagaacaagccgcatctttgactacatttgccccagctttcgcagttgaagcaagatccgaagctgcaagattgatcgctgagcgtactccaggtgatttagacaaaatcttcttcaccaacggtggcgcagatgctatcgagcacgctgttcgtatggcaagaatccacgctggtagaccaaaggtcttatccgcatacagatcataccacggtggtacacaacaggcagtcaacatcactggtgatccaaggagatgggcatccgattccgcttctgctggcgttgtccacttctgggctccatacttatacagatccagattctacgccgaaactgagcaacaagaatgtgagcgtgctcttgagcacttggaaactactatcgccttcgaaggtccaggtactattgccgctatcgttttggaaactgtcccaggtactgctggtatcatggttcctccaccaggttacttagcaggtgttagagaattgtgtgacaaatacggtatcgtcttcgtcttggatgaagtcatggctggtttcggcagaactggcgaatggttcgctgcagacttattcgatgttaccccagacttgatgaccttcgctaagggtgtcaactcaggttacgttccattgggtggtgttgctatctccggcaaaatcgcagagactttcggtaagagagcttacccaggtggtttgacgtactccggtcaccctcttgcttgcgcagccgctgttgctactatcaacgttatggcagaagaaggtgtcgttgaaaacgctgcaaacttgggtgctagagttatcgaaccaggtttgagagaacttgcagagagacacccatcagttggtgaagttagaggtgttggtatgttctgggctttggaattggttaaggatagagaaaccagagaacctttggtcccatacaatgccgctggtgaagcgaacgcaccaatggctgctttcggtgcagctgcaaaggcaaacggtttgtggccattcatcaacatgaacagaacccacgttgttcctccttgtaacgttaccgaagccgaagctaaagaaggcttggcagcattggatgcagctttatctgttgcagatgagtacactgtctaa

SEQ ID NO: 141 - DNA, 1416 bp, Saccharomyces cerevisiae
atgtccatctgtgagcaatactacccagaagaaccaaccaagccaaccgtcaagaccgaatccatccctggtccagaatcccaaaagcaattgaaggaattgggtgaagttttcgacaccagaccagcttacttcttggcagactacgaaaagtccttgggtaactacatcaccgacgtcgacggtaacacctacttggacttgtacgctcaaatctcctccatcgccttgggttacaacaacccagcattgatcaaagccgctcaatccccagaaatgatcagagcattggttgacagaccagccttgggtaacttcccttccaaggacttggacaagatcttgaagcaaatcttgaagtccgctccaaagggtcaggaccacgtctggtccggtttgtccggtgcagacgcaaacgaattggctttcaaggctgcattcatctactacagagctaagcaaagaggttacgacgcagacttctccgaaaaggaaaacttgtccgttatggacaacgacgcaccaggtgctccacacttggcagttttgtccttcaagagagctttccacggtagattgttcgcatccggttccactacctgttccaagccaatccacaagttggacttccctgctttccactggccacacgccgaatacccatcctaccagtaccctttggacgaaaactccgacgcaaacagaaaggaggacgaccactgcttggcaatcgttgaagaattgatcaagacctggtccatccctgttgctgcgttgatcatcgaaccaatccaatccgagggtggtgacaaccacgcctccaagtacttcttgcaaaagttgagagacatcaccttgaagtacaacgtcgtctacatcatcgacgaagtccaaactggcgttggcgcaaccggtaagttgtggtgtcacgaatacgcagacatccagcctccagtcgacttggtcaccttctccaagaagttccaatccgctggctacttcttccacgaccctaagttcatcccaaacaagccatacagacaattcaacacctggtgtggtgaaccagcaagaatgatcatcgcaggtgcaatcggtcaagagatctccgacaagaagttgaccgaacaatgctccagagtcggtgactacttgttcaagaagttggaaggtttgcaaaagaagtacccagagaacttccaaaacttgagaggtaagggtagaggcaccttcatcgcttgggacttgccaactggcgagaagagagacttgttgttgaagaagttgaagttgaacggctgtaacgttggtggctgtgctgttcacgcagtcagattgagaccttccttgaccttcgaagagaagcacgcagacatcttcatcgaagctttggctaagtccgtcaacgaattgtaa

SEQ ID NO: 142 - DNA, 1428 bp, Saccharomyces kluyveri
atgccatcctactccgttgcagaattgtactacccagacgaacctaccgaacctaagatctccacctcctcctacccaggtccaaaggcaaagcaagaattggaaaagttgtccaacgtcttcgacaccagagcagcttacttgttggcagactactacaagtcccgtggtaactacatcgttgaccaggacggtaacgtcttgttggacgtttacgctcaaatctcctccatcgccttgggttacaacaacccagaaatcttgaaggttgcaaagtccgacgcaatgtccgttgcattggccaaccgtccagcattggcttgtttcccatccaacgactacggtcaattgttggaagacggtttgttgaaggcagcaccacaaggtcaagacaagatctggaccgctttgtccggttccgacgcaaacgaaaccgccttcaaagcctgcttcatgtaccaagctgcgaagaagagaaacggtagatccttctccaccgaagaattggaatccgttatggacaaccaattgccaggcacctccgaaatggttatctgttccttcgaaaagggtttccacggtcgtttgttcggttccttgtccactaccagatccaagcctatccacaagttggacatcccagctttcaactggcctaaagccccattcccagacttgaagtacccattggaagaaaacaaggaagccaacaaggctgaagaatcctcctgtatcgaaaagttctcccaaatcgttcaagagtggcaaggtaagatcgctgcagttatcatcgaaccaatccagtccgagggtggcgacaaccacgcttcctccgacttcttccaaaagttgagagaaatcaccatcgaaaacggtatcttgatgatcgtcgacgaagttcaaaccggtgtcggtgctaccggcaagatgtgggcacacgaacactggaacttgtccaaccctccagacttggttaccttctccaagaagttccaagcagcaggtttctactaccacgacccaaagttgcaaccagaccagccattcagacagttcaacacctggtgtggtgacccatccaaggctttgatcgccaaggttatctacgaagaaatcgttaagcacgacttggtcaccagaactgccgaagtcggtaactacttgttcaacagattggaaaagttgttcgaaggtaagaactacatccagaacttgagaggtaagggtcaaggcacctacatcgctttcgacttcggcacctcctccgagagagactccttcttgtccagattgagatgtaacggtgcaaacgtcgctggttgcggtgactccgctgtcagattgagaccatccttgaccttcgaagagaagcacgcagacgtcttggtttccatcttcgacaagaccttgagacaattgtacggctaa

SEQ ID NO: 143 - DNA, 747 bp, Escherichia coli
atgatcgttttggtcaccggtgcaaccgcaggtttcggcgaatgtatcaccagaagattcatccagcagggtcacaaggttatcgctaccggtagaagacaagagagattgcaagaattgaaggacgagttgggtgacaacttgtacatcgctcaattggacgttagaaacagagcagctatcgaagaaatgttggcatccttgccagctgaatggtgcaacatcgacatcttggtcaacaacgctggtttggcattgggtatggaaccagctcacaaggctagtgttgaggactgggagaccatgatcgacaccaacaacaagggtttggtctacatgaccagagcagttttgcctggtatggttgaaagaaaccacggtcacatcatcaacatcggttccaccgctggttcctggccatacgctggcggtaacgtctacggtgctaccaaggctttcgttagacagttctccttgaacttgagaaccgacttgcacggcaccgctgttagagttaccgacatcgaaccaggtttggttggtggcaccgaattctccaacgtcagattcaagggcgacgacggtaaggctgaaaagacctaccaaaacaccgtcgctttgaccccagaagacgtttcagaggctgtttggtgggtcagtaccttgccagcacacgtcaacatcaacaccttggaaatgatgccagtcacccaatcctacgcaggtttgaacgttcacagacaataa

SEQ ID NO: 144 - DNA, 804 bp, Saccharomyces cerevisiae
atgtcccaaggtagaaaggcagcagaaagattggcaaagaagaccgtcttgatcaccggtgcgtccgctggtatcggtaaggctaccgcgttggagtacttggaagcatccaacggtgacatgaagttgatcttggcagcaagaagattggagaagttggaagaattgaagaagaccatcgaccaagaattcccaaacgctaaggtccacgttgcacaattggacatcacccaagcagagaagatcaagccattcatcgaaaacttgccacaagaattcaaggacatcgacatcttggtcaacaacgctggtaaggcgttgggttccgacagagttggtcaaatcgcaaccgaagacatccaagacgtcttcgacaccaacgtcaccgctttgatcaacatcacccaagctgttttgccaatcttccaagcgaagaactccggtgacatcgtcaacttgggttccatcgctggtagagacgcatacccaaccggctccatctactgcgcctccaagttcgctgtcggtgctttcaccgactccttgagaaaggaattgatcaacaccaagatcagagtcatcttgattgcccctggtttggtcgaaaccgaattctccttggttagatacagaggtaacgaagaacaagcaaagaacgtttacaaggacactaccccattgatggccgacgacgttgcagacttgatcgtttacgctacctccagaaagcaaaacaccgttatcgcagacaccttgatcttcccaaccaaccaagcatccccacaccacatcttcagaggttaa

SEQ ID NO: 145 - DNA, 420 bp, Streptomyces avermitilis
atgcttagaaccatgttcaaatccaagatccacagagcaaccgtcactcaagcagatttgcattacgttggttctgttactattgacgcagacttacttgatgcagccgatttacttcctggtgagcttgttcatattgttgatatcaccaatggtgcgcgtcttgaaacctatgtcattgagggtgaacgtggttccggtgtcgtcggtatcaatggcgcagctgcacacctcgtccatccaggtgacctggtcatcatcatttcttatgcacaggtctccgatgctgaagcccgtgccttaagaccaagagtcgttcacgtcgacagagataacagagttgtcgctttaggtgcagacccagcagagccagttccaggttccgatcaagctagatcaccacaggctgttaccgcctaa

SEQ ID NO: 146 - DNA, 420 bp, Streptomyces avermitilis
atgttaagaactatgtttaagtccaagattcacagagctaccgtcacccaagcagatttgcattacgtcggttccgttaccattgatgcagatttactcgatgcggcagacttgttacctggtgaactagttcacattgttgacattaccaatggtgctagattggaaacttacgtcattgaaggtgaaagaggtagtggtgtcgttggtatcaatggtgcagctgctcacttagttcacccaggtgacttagtcatcatcatttcatatgcacaagtttccgatgcggaagctagagcattaagaccaagagttgttcatgttgatagagacaacagagtcgttgcacttggtgcagatcctgctgaaccagttccaggttcagatcaagctaggtctccacaagcagttactgcataa

SEQ ID NO: 147 - DNA, 420 bp, Streptomyces avermitilis
atgttaagaactatgttcaagagtaagattcatagggctaccgttacccaggcagatctacattatgttggttctgttaccattgacgcagatttgttggatgcagcagacttgttaccaggtgaactcgttcacattgtcgatatcaccaacggtgccagactggaaacttatgtcattgaaggtgagagaggcagtggtgttgtcggcattaacggtgccgcagcacacttggttcatccaggtgacttggtcatcatcatttcttacgcacaagtctccgatgccgaagctagagcattgagacctagagtcgttcacgttgacagagacaatagagttgttgctcttggtgcagatccagctgagccagttccaggttccgatcaagcgagatctcctcaagctgttactgcataa

SEQ ID NO: 148 - DNA, 384 bp, Bacillus licheniformis
atgtatagaaccttgatgagtgcaaagcttcacagagcaagagtcactgaagcaaacttgaactacgttggttctgttactattgacgaagacttacttgatgcagtcggtatgatggcaaacgagaaagttcaaattgtcaacaataacaatggtgcgcgtcttgaaacctatatcattcctggtgaacgtggttccggtgtcgtctgcttgaatggcgcagctgcaaggctcgtccaagttggtgacgtcgtcatcattgtttcttatgcaatgatgtccgaagaagaagccaaaacacataagccaaaggtcgctgtcctcaatgaaagaaacgaaattgaggaaatgttaggtcaggaaccagcgagaaccatcttataa

SEQ ID NO: 149 - DNA, 384 bp, Bacillus licheniformis; identical to SEQ ID NO: 148

SEQ ID NO: 150 - DNA, 384 bp, Bacillus licheniformis
atgtacagaacgttaatgtctgccaagttacacagagcgagagttactgaagcaaatctcaactatgttggttcagttaccattgatgaggatctattggatgctgttggtatgatggcaaatgaaaaggttcaaatcgtcaataacaacaatggtgctagattagaaacttacatcattcctggtgaaagaggttcaggtgttgtttgcttaaacggtgctgccgcaagattagttcaagtcggtgatgttgttatcatcgtctcttatgctatgatgagtgaggaagaagctaagactcataagcctaaggttgccgttctcaatgagagaaacgaaatcgaagaaatgcttggccaagaacctgccagaaccatcctgtaa

SEQ ID NO: 151 - DNA, 384 bp, Bacillus licheniformis
atgtatagaacattgatgtctgcaaagttgcatagggctcgtgttactgaggcaaatctaaactacgtcggttccgtcacaatcgatgaagatctactcgatgccgttggtatgatggccaatgaaaaagttcaaattgtcaacaacaacaacggtgcaagattggagacctatatcattcctggtgaaagaggttcaggtgttgtttgtctgaacggtgctgctgcgaggttggtccaagtcggtgatgttgtcattatcgtttcttatgcaatgatgtcagaagaagaagctaagacccataagccaaaggttgctgttttgaacgaaagaaatgagattgaggaaatgttaggtcaagaaccagcaagaacaatcttataa

SEQ ID NO: 152 - DNA, 945 bp, Metallosphaera sedula
atgaccgaaaaggtctccgtcgtcggtgcaggcgtcatcggtgtcggttgggctaccttgttcgcttccaagggttactccgtctccttgtacaccgaaaagaaggaaaccttggacaagggtatcgaaaagttgcgtaactacgtccaagtcatgaagaacaactcccaaatcaccgaagacgtcaacaccgtcatctccagagtttcccctactaccaacttggacgaagccgttagaggtgcaaacttcgtcatcgaggctgtcatcgaagactacgacgctaagaagaagatcttcggttacttggactccgtcttggacaaggaagttatcttggcatcctccacctccggtttgttgatcaccgaagtccaaaaggctatgtccaagcacccagaaagagctgtcatcgcccacccatggaacccaccacacttgttgcctttggtcgaaatcgttccaggtgagaagacctccatggaagtcgttgagagaaccaagtccttgatggaaaagttggacagaatcgtcgtcgttttgaagaaggaaatcccaggtttcatcggtaacagattggcattcgctttgttcagagaagctgtctacttggttgacgagggtgtcgcaaccgtcgaggacatcgacaaggttatgactgccgctatcggcttgagatgggccttcatgggtccattcttgacctaccacttgggtggtggtgagggtggtttggaatacttcttcaacagaggtttcggttacggtgccaacgaatggatgcacaccttggctaagtacgacaagttcccatacaccggtgtcaccaaggccatccagcaaatgaaggaatactccttcatcaagggtaagaccttccaagagatctccaagtggagagacgaaaagttgttgaaggtctacaagttggtctgggaaaagtaa

SEQ ID NO: 153 - DNA, 1728 bp, Issatchenkia orientalis; identical to SEQ ID NO: 48

SEQ ID NO: 154 - protein, 575 aa, Issatchenkia orientalis; identical to SEQ ID NO: 49

SEQ ID NO: 155 - DNA, 1167 bp, Issatchenkia orientalis; identical to SEQ ID NO: 117

SEQ ID NO: 156 - protein, 388 aa, Issatchenkia orientalis; identical to SEQ ID NO: 118

SEQ ID NO: 157 - DNA, 1683 bp, Aedes aegypti
atgccagccaacggaatgttcgacgtcgctctgcaggtcatcgacgactccaacgtgtctagtggatcggacagtgctggtgtgtctgaagatgaagatgttcaactgttttgcagtaaagggaataccatagtcccgaagccgttgaaaaaatccatatcgaaaatcaaggatgaagagttcagcaaaaccgccaaagcaaacgagaaacgatacgcaagtcttccgagccgtgaacatcaccagcaattcttgaccgacttcctgtcggaagtgctgaacaatgccgttttcaacgctaccgaacgggctaacaaagttctgaactgggtggatccggagcagctcaagcgaaccttggacctggaactgaaggacgagcccgattcacatgagaagctgctggaactgaccagggccaccataaagcactcggtcaaaaccggacatccctacttcatgaaccaactgttctcgtccgtcgatccgtacgggttcgctggacagatccttaccgatgcgttgaaccccagtgtctacacgttcgaagtgtctccggtgttcgtcctgatggaggaagtggtgctcaaagaaatgagaaccatcgttggctacccggacggaaccggagatggcattttctgcccaggtggttcgatggctaacggctattccattagctgtgcccgcttcaaacacatgcccgatgtcaagacaaaaggattacattcacttccgcgcttggtaatcttcacatctgaagacgctcattattcggtgaaaaaattggcatcgttcatgggcatcggctcggacaacgtgtacccaatccatacggacgccatcggcaagatcagagtggatcatctagagtcggaaattctgcgcgccaaatcggagggagccgtgccgtttatggtgtcggccaccgcaggaacaacagtgatcggagcgtttgatccgctggagcagatcgcagatctgtgcaaaaagtacaacctctggatgcacgtggatgccgcctggggtggtggtgcacttatgtccaagaagtaccgatcgctgcttaaaggaatcgaacgatcggactcggtcacctggaacccacacaaattgctcgccgctccgcagcaatgctccaccttcctgacccgccacgagggaatcctatcggagtgccactcgaccaacgcgacctatctcttccagaaggacaaattctacgacacccagtacgacaccggcgataagcacatccagtgtggtcgccgtgccgacgtcctcaaattttggttcatgtggcgtgccaagggcacttccgggctggaacagcacatcgacaaggtgttcgagaatgcggagcacttcaccagcagtattaaatcgcgagaaggttttgaaatggtcgtcgagaatcccgagtgtaccaacgtgtgcttctggtacgtgccacctggattgcggaacgtaccacgtgacagcgcagagttcaccgaacggctgcacaaggttgcccccaaggtcaaggaacgcatgatgcgggaaggttcgatgatgatcacataccaaccgatccacgataagcccaacttcttccgattggtcctgcagaactcggccctggacaaatcggacatgaactacatcatcgatgaaatcgaacgacttgctgcagatttgtaa

SEQ ID NO: 158 - DNA, 1683 bp, Aedes aegypti
atgccagccaacggtatgttcgacgttgcattgcaagttatcgacgactccaacgtctcctccggttccgactccgctggtgtctccgaagacgaagacgtccaattgttctgttctaagggcaacaccatcgtcccaaagccattgaagaagtccatctccaagatcaaggacgaagaattctccaagaccgctaaggcaaacgaaaagagatacgcctccttgccatccagagagcatcaccagcaattcttgaccgacttcttgtccgaagttttgaacaacgcagttttcaacgctaccgaaagagcaaacaaggtcttgaactgggttgacccagaacaattgaagagaaccttggacttggaattgaaggacgaaccagactcccacgaaaagttgttggaattgaccagagcaaccatcaagcactccgttaagaccggtcacccatacttcatgaaccaattgttctcctccgtcgacccatacggtttcgctggtcaaatcttgaccgacgctttgaacccatccgtctacaccttcgaagtttccccagtcttcgttttgatggaagaagtcgttttgaaggaaatgagaaccatcgttggttacccagacggcaccggtgacggtatcttctgtccaggtggttccatggcaaacggttactccatctcctgtgcaagattcaagcacatgccagacgttaagaccaagggtttgcactccttgccaagattggtcatcttcacctccgaagacgcccactactccgtcaagaagttggcttccttcatgggtatcggctccgacaacgtctacccaatccacaccgacgcaatcggcaagatcagagtcgaccacttggaatccgaaatcttgagagccaagtccgaaggtgcggttcctttcatggtctccgctactgctggcactaccgttatcggtgcattcgacccattggaacaaatcgcagacttgtgcaagaagtacaacttgtggatgcacgtcgacgctgcttggggtggtggtgctttgatgtccaagaagtacagatccttgttgaagggtatcgaaagatccgactccgttacctggaacccacacaagttgttagccgcacctcaacaatgttccaccttcttgaccagacacgaaggtatcttgtccgaatgtcactccaccaacgcaacctacttgttccaaaaggacaagttctacgacacccaatacgacaccggtgacaagcacatccaatgtggtagaagggcagacgtcttgaagttctggttcatgtggcgtgccaagggcacctccggtttggaacaacacatcgacaaggttttcgaaaacgctgaacacttcacctcctccatcaagtccagagaaggtttcgaaatggttgttgagaacccagaatgtaccaacgtctgtttctggtacgtcccaccaggtttgagaaacgtccctagagactccgctgaattcaccgaaagattgcacaaggtcgcaccaaaggtcaaggaaagaatgatgagagaaggttccatgatgatcacctaccaacctatccacgacaagccaaacttcttccgtttggttttgcaaaactccgcattggacaagtccgacatgaactacatcatcgacgagatcgagagattggcagcagacttgtaa

SEQ ID NO: 159 - DNA, 1683 bp, Aedes aegypti
atgccagccaacggtatgttcgacgttgctttgcaagttatcgacgactccaacgtttcctccggttccgactccgcaggtgtttccgaagacgaagacgtccaattgttctgctccaagggtaacaccatcgtcccaaagccattgaagaagtccatctccaagatcaaggacgaggaattctccaagaccgctaaggcaaacgaaaagagatacgcgtccttgccttccagagaacatcaccagcaattcttgaccgacttcttgtccgaagtcttgaacaacgcagttttcaacgctaccgaaagagcaaacaaggtcttgaactgggttgacccagagcaattgaagagaaccttggacttggaattgaaggacgaaccagactcccacgaaaagttgttggaattgaccagggcaaccatcaagcactccgtcaagaccggtcacccttacttcatgaaccaattgttctcctccgtcgacccatacggtttcgctggtcaaatcttgaccgacgctttgaacccatccgtttacaccttcgaagtctccccagttttcgtcttgatggaagaggttgtcttgaaggagatgagaaccatcgtcggttacccagacggcaccggtgacggcatcttctgtccaggtggttccatggcaaacggttactccatctcctgtgcaagattcaagcacatgccagacgtcaagaccaagggtttgcactccttgccaagattggtcatcttcacctccgaagacgctcactactccgtcaagaagttggcttccttcatgggtatcggttccgacaacgtctacccaatccacaccgacgcaatcggtaagatcagagttgaccacttggaatccgaaatcttgagagctaagtccgaaggtgcagtccctttcatggtctccgcaaccgcaggcactaccgtcatcggtgcattcgaccctttggagcaaatcgcagacttgtgtaagaagtacaacttgtggatgcacgttgacgctgcttggggtggtggcgcattgatgtccaagaagtacagatccttgttgaagggtatcgagagatccgactccgtcacctggaaccctcacaagttgttagccgctccacagcaatgttccaccttcttgaccagacacgaaggtatcttgtccgaatgtcactccaccaacgcaacctacttgttccaaaaggacaagttctacgacacccaatacgacaccggtgacaagcacatccaatgcggtagaagggcagacgtcttgaagttctggttcatgtggcgtgcaaagggcacctccggtttggagcaacacatcgacaaggtcttcgaaaacgccgaacacttcacctcctccatcaagtcccgtgaaggtttcgagatggtcgtcgaaaacccagagtgcaccaacgtctgtttctggtacgtccctccaggtttgagaaacgtcccacgtgactccgctgaattcaccgagagattgcacaaggttgccccaaaggtcaaggaacgtatgatgagagagggttccatgatgatcacctaccaaccaatccacgacaagccaaacttcttcagattggttttgcagaactccgcattggacaagtccgacatgaactacatcatcgacgagatcgaaagattggctgccgacttgtaa

SEQ ID NO: 160 - DNA, 1683 bp, Aedes aegypti
atgcctgcaaacggtatgttcgacgtcgcattgcaagttatcgacgactccaacgtctcctccggttccgactccgctggtgtctccgaagacgaagacgtccagttgttctgttccaagggtaacaccatcgtccctaagccattgaagaagtccatctccaagatcaaggacgaagaattctccaagaccgcaaaggcaaacgaaaagagatacgcttccttgccatccagagagcatcaccagcaattcttgaccgacttcttgtccgaagttttgaacaacgcagtcttcaacgctaccgagagagccaacaaggtcttgaactgggtcgacccagaacaattgaagagaaccttggacttggaattgaaggacgaaccagactcccacgaaaagttgttggagttgaccagagctaccatcaagcactccgtcaagaccggtcacccttacttcatgaaccaattgttctcctccgtcgacccatacggtttcgcaggccaaatcttgaccgacgctttgaacccttccgtctacaccttcgaagtctccccagttttcgtcttgatggaagaagtcgttttgaaggagatgagaaccatcgttggttacccagacggcaccggtgacggcatcttctgtccaggcggttccatggcaaacggttactccatctcctgtgcacgtttcaagcacatgccagacgtcaagaccaagggtttgcactccttgccaaggttggtcatcttcacctccgaagacgcccactactccgttaagaagttggcatccttcatgggtatcggttccgacaacgtctacccaatccacaccgacgcaatcggtaagatcagggttgaccacttggaatccgaaatcttgagagctaagtccgaaggtgctgtcccattcatggtctccgcaaccgctggcactaccgtcatcggtgccttcgaccctttggaacaaatcgccgacttgtgcaagaagtacaacttgtggatgcacgttgatgctgcgtggggtggtggtgcgttgatgtccaagaagtacagatccttgttgaagggtatcgaacgttccgactccgtcacctggaacccacacaagttgttagcggcaccacaacagtgctccaccttcttgaccagacacgagggtatcttgtccgaatgccactccaccaacgctacctacttgttccagaaggacaagttctacgacacccaatacgacactggcgacaagcacatccagtgtggtagaagagcagacgttttgaagttctggttcatgtggagagctaagggcacctccggtttggaacaacacatcgacaaggtcttcgaaaacgccgaacacttcacctcctccatcaagtccagagaaggtttcgaaatggttgtcgaaaacccagaatgtaccaacgtttgtttctggtacgttccaccaggtttgaggaacgtcccaagagactccgcagagttcaccgaaagattgcacaaggtcgcacctaaggttaaggaaagaatgatgagagagggttccatgatgatcacctaccaacctatccacgacaagccaaacttcttcaggttggtcttgcaaaactccgcgttggacaagtccgacatgaactacatcatcgacgagatcgaaagattggcagcagacttgtaa

SEQ ID NO: 161 - DNA, 1683 bp, Aedes aegypti
atgcctgcaaacggtatgttcgacgtcgctttgcaagtcatcgacgactccaacgtctcctccggttccgactccgcaggcgtctccgaagacgaagacgttcaattgttctgttccaagggtaacaccatcgttccaaagccattgaagaagtccatctccaagatcaaggacgaagaattctccaagaccgctaaggcaaacgagaagagatacgcttccttgccatccagagaacatcaccaacaattcttgaccgacttcttgtccgaagttttgaacaacgctgtcttcaacgctaccgaaagagccaacaaggtcttgaactgggtcgacccagaacaattgaagagaaccttggacttggaattgaaggacgagccagactcccacgagaagttgttggaattgaccagagctaccatcaagcactccgtcaagaccggtcacccatacttcatgaaccagttgttctcctccgtcgacccatacggtttcgctggtcaaatcttgaccgacgcattgaacccttccgtttacaccttcgaagtttcccctgtcttcgtcttgatggaagaagtcgtcttgaaggaaatgagaaccatcgtcggttacccagacggcactggcgacggtatcttctgtcctggtggttccatggccaacggttactccatctcctgtgctagattcaagcacatgccagacgttaagaccaagggtttgcactccttgcctagattggtcatcttcacctccgaagacgctcactactccgttaagaagttggcctccttcatgggtatcggttccgacaacgtctacccaatccacaccgacgcaatcggtaagatcagagtcgaccacttggagtccgaaatcttgagagcaaagtccgaaggcgcagtcccattcatggtctccgcgaccgcaggcactaccgtcatcggtgctttcgacccattggaacagatcgcagacttgtgtaagaagtacaacttgtggatgcacgtcgatgccgcttggggtggtggcgctttgatgtccaagaagtacagatccttgttgaagggcatcgagagatccgactccgttacctggaacccacacaagttgttggctgctccacaacaatgttccaccttcttgaccagacacgagggtatcttgtccgaatgtcactccaccaacgctacctacttgttccaaaaggacaagttctacgacacccaatacgacaccggtgacaagcacatccaatgtggtagaagggcagacgtcttgaagttctggttcatgtggagggcaaagggcacctccggtttggagcaacacatcgacaaggtcttcgaaaacgctgaacacttcacctcctccatcaagtccagagaaggcttcgaaatggtcgttgaaaaccctgaatgtaccaacgtctgcttctggtacgtcccaccaggtttgaggaacgtccctagagactccgctgaattcaccgaacgtttgcacaaggtcgcaccaaaggttaaggaaaggatgatgagagaaggttccatgatgatcacctaccaaccaatccacgacaagccaaacttcttcagattggttttgcaaaactccgcattggacaagtccgacatgaactacatcatcgacgaaatcgaaagattggcagcagacttgtaa

SEQ ID NO: 162 - protein, 560 aa, Aedes aegypti
MPANGMFDVALQVIDDSNVSSGSDSAGVSEDEDVQLFCSKGNTIVPKPLKKSISKIKDEEFSKTAKANEKRYASLPSREHHQQFLTDFLSEVLNNAVFNATERANKVLNWVDPEQLKRTLDLELKDEPDSHEKLLELTRATIKHSVKTGHPYFMNQLFSSVDPYGFAGQILTDALNPSVYTFEVSPVFVLMEEVVLKEMRTIVGYPDGTGDGIFCPGGSMANGYSISCARFKHMPDVKTKGLHSLPRLVIFTSEDAHYSVKKLASFMGIGSDNVYPIHTDAIGKIRVDHLESEILRAKSEGAVPFMVSATAGTTVIGAFDPLEQIADLCKKYNLWMHVDAAWGGGALMSKKYRSLLKGIERSDSVTWNPHKLLAAPQQCSTFLTRHEGILSECHSTNATYLFQKDKFYDTQYDTGDKHIQCGRRADVLKFWFMWRAKGTSGLEQHIDKVFENAEHFTSSIKSREGFEMVVENPECTNVCFWYVPPGLRNVPRDSAEFTERLHKVAPKVKERMMREGSMMITYQPIHDKPNFFRLVLQNSALDKSDMNYIIDEIERLAADL

SEQ ID NO: 163 - protein, 563 aa, Culex quinquefasciatus
MPTNGMFDVALQVIEDANLSSGSDSAGVSEDEDVQLFCTTGNVVSSKPLKKPSLKPVTTVKDEDQNKMKTNAKRYASLPNREQHQRFLTDFLSEVLNNAIFNATDRSNKVLNWVDPEELKRSIDLSLKAEPDSDEKLLELARATIDHSVKTGHPYFMNQLFSSVDVYGFAGQCLTDALNPSVYTFEVSPVFVLMEEVVLKEMRTIVGFPGGVGDGIFCPGGSMANGYAISCARFKHMPDVKTKGLHSLPRLVIFTSEDAHYSIKKLASFMGIGSDNVYPIRTDAVGKIQPDHLEAEILRAKSEGALPFMVSATAGTTVIGAFDPLEQIADLCQKYNLWMHVDAAWGGGALMSKKYRTLLKGVERADSVTWNPHKLLAAPQQCSTFLTRHEGILSGCHSTNATYLFQKDKFYDTQYDTGDKHIQCGRRADVLKFWFMWRAKGTSGFEQHIDKVFENAEYFTNSIKARPGFEMVIENPECTNVCFWYVPPGLRQVPRDSAEFGERLHKVAPKVKERMMREGSMMITYQPIHDKPNFFRLVLQNSGLDKSDMNYIIDEIERLASDL

SEQ ID NO: 164 - protein, 567 aa, Anopheles gambiae
MPANGVCSVGLEVIEDNATYASGSDSAGVSEDEDVQQLFVSGADRVTSVLPKKSDIRKASQVDEQAAAAAAAAVSEKRYASLPNREQHQQFLTQFLTEVLNSAVFNATDRANKVLNWVDPEELQRTLDLALKDEPDTHEKLLELTRATIRHSVKTGHPYFMNQLFSSVDPYGFAGQVLTDALNPSVYTYEVSPVFVLMEEVVLREMRTIVGYPDGEGDGIFAPGGSMANGYAISCARHKFMPDIKTKGLHALPRLVIFTSEDAHYSVKKLASFMGIGSDNVYAIKTDNVGKIRVEHLESEILRAKSEGALPFMVSATAGTTVIGAFDPLEQIADLCAKYNLWMHVDAAWGGGALMSKKYRTLLKGIERSDSVTWNPHKLLAAPQQCSTLLTRHRNILAEAHSTNATYLFQKDKFYDTRYDTGDKHIQCGRRADVLKFWFMWRAKGTAGFEAHIDKVFENAEHFTSSIKARPGFEMVIEQPECTNVCFWYVPPGLRGVPRDSAEYRDRLHKVAPKVKERMMKDGSMMITYQPIHDKPNFFRLVLQNSSLDKSDMNYIIDEIERLGKDL

SEQ ID NO: 165 - protein, 540 aa, Tribolium castaneum
MPATGEDQDLVQDLIEEPATFSDAVLSSDEELFHQKCPKPAPIYSPVSKPVSFESLPNRRLHEEFLRSSVDVLLQEAVFEGTNRKNRVLQWREPEELRRLMDFGVRSAPSTHEELLEVLKKVVTYSVKTGHPYFVNQLFSAVDPYGLVAQWATDALNPSVYTYEVSPVFVLMEEVVLREMRAIVGFEGGKGDGIFCPGGSIANGYAISCARYRFMPDIKKKGLHSLPRLVLFTSEDAHYSIKKLASFQGIGTDNVYLIRTDARGRMDVSHLVEEIERSLREGAAPFMVSATAGTTVIGAFDPIEKIADVCQKYKLWLHVDAAWGGGALVSAKHRHLLKGIERADSVTWNPHKLLTAPQQCSTLLLRHEGVLAEAHSTNAAYLFQKDKFYDTKYDTGDKHIQCGRRADVLKFWFMWKAKGTSGLEKHVDKVFENARFFTDCIKNREGFEMVIAEPEYTNICFWYVPKSLRGRKDEADYKDKLHKVAPRIKERMMKEGSMMVTYQAQKGHPNFFRIVFQNSGLDKADMVHLVEEIERLGSDL

SEQ ID NO: 166 - protein, 600 aa, Attagenus smirnovi
  misc_feature (36)..(36): Xaa can be any naturally occurring amino acid
MVTIWPTSPQGKVIAARPARDPSTSYNGGFAAQYRXFVIQSCKQLNFSSRGITNHARQRRSEKYNLEEDVTDEATSNSDHSPSEDDDLYVRHTNGFNIKPSKPIIEPRKFATFPSVPDKEHHEDFIKACVDILLKEAVFDGTNRKNRVLEWHSPEELKKLFDFNLRKSGSSHEELTRLIKDTIHYSVKTGHPYFVNQLFSSVDLYGLVGQWLTDALNPSVYTYEVSPVFTLMEETVLREMRTIVGFEDGKGDGIFCPGGSMANGYAISCARYKFKPDIKDTGLHGLPRLVLFTSEDAHYSIKKMASLLGIGSNNVYLIKTDELGRMSVPHLVEQIERVHKEGGAPFMVSATAGTTVLGAFDPIQELADVCERYNLWLHVDAAWGGGALISQRHRHLLTGINRADSVTWNPHKLLTAPQQCSTLLLRHEGILAGAHSANAAYLFQKDKFYDTRYDTGDKHVQCGRRADVLKFWFMWKAKGTIGFEQHIDKVFDNAKFFSDNIRHRPGFRMVLEDPECTNICFWYVPPSMRGCEDQQDFNERLHKVAPKIKERMMKEGSMMVTYQPQKSLPNFFRIVFQNSGLERSDMLHLIKEFERLGHDL

SEQ ID NO: 167 - protein, 537 aa, Acyrthosiphon pisum
MPIVMPAATVPTDYATARPVELMVTASTLDETPCGKGPMMESLSAAVCGYKSAPNAADHEAFVRDAVRLMLEQAVFRGTDRRRPVLNWKSPEELQAAFDFALDRSPTTHGHLLNLIEDTIEHSVKTGHPYFINQLFSSVDPYGLIGQWLTDALNPSVYTFEVAPVMTIMEETVLTEMRKFLGYPDGKGDGIFCPGGSIANGYAINCARFSAFPEVKTRGMHGLPRLVVYTSADAHYSIKKLCAFEGIGSDNLYLINTDAKGKMDVSHLRQQIQRTLEEKAVPIMVSATAGTTVLGAFDPIAEIADVCHEYGIWLHVDAAWGGGALVSKKHKHLLTGIDRADSVTWNPHKMLTAPQQCSTFLTKHERVLTESNSSCAQYLFQKDKFYDTTYDTGDKHIQCGRRADVFKFWFMWKAKGTDGLEAHVDENFDNAKYFTEMIRNRAGFKLVLEEPEYTNITFWYIPPSLRGRQNEPDFKNKLHKVAPRIKERMMKEGTMMITYQPSDDLPNFFRLVLQNSSLDQNDMDYFVNEIERLGSDL

SEQ ID NO: 168 - protein, 576 aa, Drosophila sechellia
MLASENFPTHHFKESIFKPYSTTSGDDLASVTPLTATAALVASTPSPADSTSAVAFEQASKMLATAANNNNNNNNNNITSTKDDLSSFVASHPAAEFEGFIRACVDEIIKLAVFQGTNRSSKVVEWHEPAELRQLFDFQLREQGESQDKLRELLRETIRFSVKTGHPYFINQLYSGVDPYALVGQWLTDALNPSVYTYEVAPLFTLMEEQVLAEMRRIVGFPNGGQGDGIFCPGGSIANGYAISCARYRHSPESKKNGLFNAKPLIIFTSEDAHYSVEKLAMFMGFGSEHVRKIATNEVGKMRLSDLEEQVKQCLENGWQPLMVSATAGTTVLGAFDDLAGISELCKKYNMWMHVDAAWGGGALMSKKYRHLLNGIERADSVTWNPHKLLAASQQCSTFLTRHQQVLAQCHSTNATYLFQKDKFYDTSFDTGDKHIQCGRRADVFKFWFMWKAKGTQGLEAHVEKVFRMAEFFTAKVRERPGFELVLESPECTNISFWYVPPGLREMERNREFYDRLHKVAPKVKEGMIKKGSMMITYQPLRQLPNFFRLVLQNSCLEESDMVYFLDEIESLAQNL

SEQ ID NO: 169 - protein, 575 aa, Drosophila melanogaster
MLASENFPTHHFKESIFKPYSTTSGDDLASVSPLTATAALVASTSSPADSTSTVAFEQASKMLANAANNNNNNNNNITSTKDDLSSFVASHPAAEFEGFIRACVDEIIKLAVFQGTNRSSKVVEWHEPAELRQLFDFQLREQGESQDKLRELLRETIRFSVKTGHPYFINQLYSGVDPYALVGQWLTDALNPSVYTYEVAPLFTLMEEQVLAEMRRIVGFPNGGQGDGIFCPGGSIANGYAISCARYRHSPESKKNGLFNAKPLIIFTSEDAHYSVEKLAMFMGFGSDHVRKIATNEVGKMRLSDLEKQVKLCLENGWQPLMVSATAGTTVLGAFDDLAGISEVCKKYNMWMHVDAAWGGGALMSKKYRHLLNGIERADSVTWNPHKLLAASQQCSTFLTRHQQVLAQCHSTNATYLFQKDKFYDTSFDTGDKHIQCGRRADVFKFWFMWKAKGTQGLEAHVEKVFRMAEFFTAKVRERPGFELVLESPECTNISFWYVPPGLREMERNREFYDRLHKVAPKVKEGMIKKGSMMITYQPLRQLPNFFRLVLQNSCLEESDMVYFLDEIESLAQNL

SEQ ID NO: 170 - protein, 508 aa, Danaus plexippus
MRVDSKIIVKKETQDENLYQSLAERSKHEEFLRKAVDLLVERVVFGRSTRSSKVVEWAAPDEIKKAIDLKPRLGPASHDELLAFMANVARYSVNTGHPYFVNQLFSSVDPYGLVGQWLTDALNPSVYTFEVAPVFTLMEEEVLREMRKIVGWPEGEGDGIFCPGGSIANGYAISCARHHFYPEVKYKGVHAVPKLVLFTSELAHYSTKKMAAFMGIGSDNCVNIKTDDVGKMNIVDLEMKIKIAIDNKCTPFMVTATSGTTVFGAFDPLVAISDLCKKYNLWLHVDAAWGGGALMSKKHRHLLNGIELADSVTWNPHKLLAAPQQCSTFLTRHKKVLSEGHSSNAKYLFQKDKFYDTSYDTGDKHIQCGRRADVLKFWFMWKAKGTEGFEKHVDKLFDNAKYFLDHIKQREGFQLVIAEPQCTNIMFWYIPKCLRGCENDADYYERLHKVAPKIKERMIKEGSMMVTYQPQGDLVNFFRIVFQNSALDHKDMVYFANEFERLGSDMIV

SEQ ID NO: 171 - protein, 570 aa, Drosophila yakuba
MLASENFPTHHFKESIFKPYSTSGDDLASATPLTAAAALVATTSSPADSSSAVAFETASKMLATNNNNNNNITSSKDDLSSFVASHPAAEFEGFIRACVDEIIKLAVFQGTNRSSKVVEWHEPAELRQLFDFQLREKGESQDKLRELLRETIRFSVKTGHPYFINQLYSGVDPYALVGQWLTDALNPSVYTYEVAPLFTLMEEQVLAEMRRIVGFPNGGQGDGIFCPGGSIANGYAISCARYRHSPESKKNGLFNAKPLIIFTSEDAHYSVEKLAMFMGFGSEHVRKIATNEVGKMRLSDLEEQVKQCLENNWQPLMVSATAGTTVLGAFDDLAGISELCKKYNMWMHVDAAWGGGALMSKKYRHLLSGIERADSVTWNPHKLLAASQQCSTFLTRHQQVLAQCHSTNATYLFQKDKFYDTSFDTGDKHIQCGRRADVFKFWFMWKAKGTQGLEAHVEKVFRMAEFFTAKVRERPGFELVLESPECTNISFWYVPPGLREMERNREFYDRLHKVAPKVKEGMIKKGSMMITYQPLRQLPNFFRLVLQNSCLEESDMVYFLDEIESLAQNL

SEQ ID NO: 172 - protein, 572 aa, Drosophila erecta
MLASENFPTHHFKESIFKPYSTSGDDLASVTPLTAAAALVASTSSPADSSSAVAFETASKMLTTTNSNNNNNNTTSAKDDLSSFVASHPAAEFEGFIRACVDEIIKLAVFQGTNRSSKVVEWHEPAELRQLFDFQLREKGESQDKLRELLRETIRFSVKTGHPYFINQLYSGVDPYALVGQWLTDALNPSVYTYEVAPLFTLMEEQVLAEMRRIVGFPNGGQGDGIFCPGGSIANGYAISCARYRHSPESKKNGLFNAKPLIIFTSEDAHYSVEKLAMFMGFGSEHVRKIATNEVGKMRLSDLEEQVKQCLENDWQPLMVSATAGTTVLGAFDDLAGISDVCKKYNMWMHVDAAWGGGALMSKKYRHLLSGIERADSVTWNPHKLLAASQQCSTFLTRHQQVLAQCHSTNATYLFQKDKFYDTSFDTGDKHIQCGRRADVFKFWFMWKAKGTQGLEAHVEKVFRMAEFFTAKVRERPGFELVLESPECTNISFWYVPPGLREMERNREFYDRLHKVAPKVKEGMIKKGSMMITYQPLRQLPNFFRLVLQNSCLEESDMVYFLDEIESLAQNL

SEQ ID NO: 173 - protein, 508 aa, Papilio xuthus
MPADSNLIVAGEAIKESLFQSLPERSKHEEFIRRAVDLLVERVVFGRSQRSAKVVEWAAPDEIKSVIDLKPREGPVSHDELLAIMADVARYSVNTGHPYFVNQLFSTVDPYGLIGQWLTDALNPSVYTYEVAPVFTLMEEEVLREMRAIVGWKDGDGDGIFCPGGSISNGYAISCARHHFYPDVKSKGVYAVPKLVLFTSELAHYSTKKMACFMGIGSDNCIMIKTDELGKMDVGDLEIKISEAINSGSTPFMVTATAGTTVFGAFDPLIPISDLCKKYNLWLHVDAAWGGGALMSKKHRHLLKGIELADSVTWNPHKLLAAPQQCSTFLVRHKNVLKEGHSSNAKYLFQKDKFYDTSYDTGDKHIQCGRRADVLKFWFMWKAKGSDGFEKHIDKLFDNAKYFLDHIKQRAGFKLVLENPECTNIMFWYVPNCLRGCENDPNYRERLHKVAPKIKERMIKEGSMMVTYQPQGNLVNFFRIVFQNSALDHKDMVYFANEFERLGSDIIV

SEQ ID NO: 174 - protein, 589 aa, Drosophila persimilis
MLASETFPAHRFKESIFKPYSTSGSASVDDLASVNKTLTSAATTSSSPDTHAAVDIAPTASSVEFETARKMLTNNSSSSSNNSNNNNNNNNNDAKDDISGFVASHPAAPFEGFIRACVDEIIKLAVFQGTNRSTKVVEWHEPAELRQLFDFQLRDKGEPQEKLRELLRETIRFSVKTGHPYFINQLYSGVDPYALVGQWLTDALNPSVYTYEVAPLFTLMEEQVLAEMRRIVGFPNGGKGDGIFCPGGSIANGYAISCARYTYAPESKKNGLFNAKPLIIFTSEDAHYSVEKLAMFMGFGSEHVVKIATNEVGKMRLSDLEDQVRRCLDNGWQPLMVSATAGTTVLGAFDDLTGIGDLCRKYNMWMHVDAAWGGGALMSKKYRHLLNGIERADSVTWNPHKLLAASQQCSTFLTRHQLVLGQCHSTNAAYLFQKDKFYDTSYDTGDKHIQCGRRADVFKFWFMWKAKGNLGLESHVEKVFRMAEFFTAKVRERPGFELVLESPECTNISFWYVPPSLRTMERDREFYDKLHKVAPKVKERMIKKGSMMITYQPLRQLPNFFRLVLQNSCLEESDMIYFLDEIESLAKNL

SEQ ID NO: 175 - protein, 511 aa, Bombyx mori
MPADSDLIVAEREDLGIDRTLYKSLSERSKHEDFIRRAVDLLVERVVFGRSLRTSKVVEWAVPSEIKKAIDLKPRDGPISHDELLGLMADVARYSVNTAHPYFVNQLYSSVDPYGLVGQWLTDALNPSVYTYEVAPVFTLMEEEVLKEMRVLVGWKDGEGDGIFCPGGSIANGYAISCARFHFYPEIKTKGVYAVPKLTLYTSELAHYSTKKLAAFMGIGDENCVLIKTDKYGKIDVEDLEAKIVEGIEEGAAPFLVTATAGTTVFGAFDPLVPIAALCKKYNLWLHVDAAWGGGALMSKKHRHLLNGIELADSVTWNPHKLLAAPQQCSTFLIRHKNVLKEGHSCNAKYLFQKDKFYDTSYDTGDKHIQCGRRADVLKFWFMWKAKGSDGFENHIDTLFDNARFFLEQIRNREGFELVIEKPECTNIMFWYVPRCLRGCENESDYRERLHKVAPKIKELMIKEGSMMVTYQPQGDLVNFFRIVFQNSALDHKDMIYFVNEFERLGRDILV

SEQ ID NO: 176 - protein, 578 aa, Drosophila ananassae
MLASKNYPTHHFKESIFKPYSTSGDDLASVNTLTASAASAAMVATTSSSADTVAVDFENARRMLATNGGIASNGNNNNNVLDSKDSLSGFVASHPAAQFDGFIRACVDEIIKLAVFQGTNRSSKVVEWHEPAELRQLFDFQLREKGESQDKLRELLRETIRFSVKTGHPYFINQLYSGVDPYALVGQWLTDALNPSVYTYEVAPLFTLMEEQVLAEMRRIVGFPNGGQGDGIFCPGGSIANGYAISCARYKYTPESKKNGLFNAKPLIIFTSEDAHYSVEKLAMFMGFGSEHVRKIATNEVGKMRVEDLENQIKMCLENNCQPLMVSATAGTTVLGAFDDLVGISELCKKYNMWMHVDAAWGGGALMSKKYRHLLNGIERADSVTWNPHKLLAASQQCSTFLTPHQQILAQCHSTNATYLFQKDKFYDTSFDTGDKHIQCGRRADVFKFWFMWKAKGSQGLEAHVEKVFRMAEFFTAKVRERPGFELVLDQPECTNISFWYVPPSLRQMERNREFYDRLHKVAPKVKEGMIKKGSMMITYQPLRQLPNFFRLVLQNSCLEESDMLYFLNEIESLAQNL

SEQ ID NO: 177 - protein, 580 aa, Drosophila mojavensis
MLASENFQAHLYNRSSIYKPYNEELASMAKQLTTATADAAGIDAAQAAVDYGSPSKQMLGSNNGSSSGSSNKTSSANSNNNNNNVANGLSSFVASHPSAEFEGFIRACVDEIIQLAVLQGTNRSSKVVEWHEPAELRKLFDFELRDQPDSPDKLRQLLRETIRFSVKTGHPYFINQLYSGVDPYALIGQWLTDALNPSVYTYEVAPVFTLMEEQVLGEMRRIVGFPNNGQGDGIFCPGGSIANGYAISCARYQYAPESKKNGLFNAKPLVIFTSEDAHYSVEKLAMFMGFGSEHVRKIATNELGKMRLSDLEQQIQFCLDNNWQPLMVSATAGTTVLGAFDDLLGISELCRKHNMWMHVDAAWGGGALMSKKYRQLLNGIERADSVTWNPHKLLSASQQCSTFLTRHTQILGQCHSTNAAYLFQKDKFYDTSFDTGDKHIQCGRRADVFKFWFMWKAKGTKGFEAHVEQVFEMSEYFTNKLRERPGFELVLDKPECTNITFWYVPPSLRQMERNQEFYDKLHKVAPKIKEAMIKKGSMMITYQPLRKLPNFFRLVLQNSCLDESDMLYFLNEIETLGQKL

SEQ ID NO: 178 - protein, 588 aa, Drosophila grimshawi
MLASKTFPTHHFKKSIYTTYNGASAPTNVEDLANVAKTLTTTTSSSSDSTVVEANTSPVEFSTPSKMLSSTSTTTTTTTNNNNNNNSNNNNNIVNGLSSFVASHPAAEFEGFIRACVDEIIHLAVFQGTDRASKVVEWHEPAELRKLFDFELREKGESQEKLRQLMRETIRYSVKTGHPYFINQLYSGVDPYALVGQWLTDALNPSVYTYEVAPVFTLMEEQVLAEMRRIVGFPDNGHGDGIFCPGGSIANGYAISCARYNYAPESKKNGLFNAKPLIIFTSEDAHYSVEKLAMFMGFGSENVRKIATNEVGKMRLSDLEEQIQLCLDNNWQPLMVSATAGTTVLGAFDDLVGISELCRKHNMWMHVDAAWGGGALMSKKYRHLLNGIERADSVTWNPHKLLSASQQCSTFLTRHAQILGQCHSTNAAYLFQKDKFYDTSFDTGDKHIQCGRRADVFKFWFMWKAKGSKGFEAHVEQVFEMSEFFTAKLRERPGFELVLDHPECTNITFWYVPPSLRHMEHNQEFYDKLHKVAPKIKEAMIKKGSMMITYQPLRKLPNFFRLVLQNSCLEESDMLYFINEIESLGQNL

SEQ ID NO: 179 - protein, 461 aa, Biston betularia
SQRSAKVVEWAAPEEIKKAIDLKPRDGPASHDQLLGLMADVARYSVNTGHPYFVNQLFSSVDPYGLIGQWLTDALNPSVYTFEVAPVFTLMEEEVLKEMRSLVGWKNGDGDGIFCPGGSIANGYAISCARFYYYPDIKTKGVYAVPRLVLFTSELAHYSTKKMAAFMGIGSDNCILVKADKLGKMDAEDLEVKINEALDDGATPFLVTATAGTTVYGAFDPLAQISSLCKKYNLWLHVDAAWGGGALMSKKHRHLLTGIELADSVTWNPHKLLAAPQQCSTFLIKHKNVLKDGHSSNAKYLFQKDKFYDTSYDTGDKHIQCGRRADVLKFWFMWKAKGSEGFEQHIDTLFDNAKHFVYLIRNREGYRLVIEEPECTNIMFWYIPKCLRGCENEPDYKERLNKVAPKIKERMIKEGSMMVTYQPQGDLANFFRIVFQNSALDHKDMVYFANEFERLGRDIVV

SEQ ID NO: 180 - protein, 583 aa, Drosophila willistoni
MLASENFPTHHFKESIFKPYNATTSAANAAAAATVEDLANVAKTLTSKSTTSSSVASDAAATVSLMGAVDIETARKMLANNNVNINNNNNNNINNNNSKDTAEFESFLRGCIDEIIKLAVVEGTNRSSKVVEWHEPSELRQIFDFQLREKGESQDKLRELLRETIRFSVKTGHPYFINQLYSGVDPYALVGQWLTDSLNPSVYTYEVAPVFTLMEEEVLAEMRRIVGFPDNGLGDGIFCPGGSIANGYAISCARYKYAPESKKNGLFSGKPLIIFTSEDAHYSVEKLAMFMGFGSEHVRKIATNEVGKMRLSDLEQQIQLCLDNNWQPLMVSATAGTTVLGAFDDLVGISELCRKHNMWMHVDAAWGGGALMSKKYRHLLNGIERADSVTWNPHKLLAASQQCSTFLTRHQQILGQCHSTNATYLFQKDKFYDTSYDTGDKHIQCGRRADVFKFWFMWKAKGSEGLRAHVEQVFRMSEYFTQQVRERPGFELVLESPECTNISFWYIPPSLRHMERNQEFYDKLHKVAPKIKEGMIKKGSMMITYQPLRRLPNFFRLVLQNSCLEESDMLYFLNEIESLGHQL

SEQ ID NO: 181 - protein, 548 aa, Apis mellifera
MPANEETLSMTSDQIRNNLLGKACDDSMQNNFDCESSGDDEEDYQNDCSRSIVKENFKEVCNYKSLPVREIHKKFMKSFVNLLLEEAVFEGTLRRNKVVEWIEPTTLHSIIDLKLSDQGCSYETLLTLAHNVIKYSVKTGHPRFINQLYSSVDPYGLLGQWLTDALNPSVYTYEVSPVFSLMEEEILREMRKIVGWKDGRSEGIFCPGGSIANGYAINLARYYKFPQSKELGLFNTGRLIIFTSRDAHYSVKKLSAFLGIGTENVYEVKTDDKGKMCITDLKIQIKKALEEDAIPLMVSATAGTTVLGAFDPLKNIAAICKNYNLWFHVDAAWGGGALMSKKYKYLLDGIELADSVTWNPHKLLAAPQQCSTLLLRHEGLLQDAHGSKASYLFQPDKFYDTSFDSGDKHIQCGRRADVLKFWFMWKAKGTRGLEKHVDRVFKLARYFTNYIKHREGFKLILEPECTNVCFWYVPPSKRQLQNEELLKALQKIGPAVKERMMKKGSMLITYQPLRELPNFFRLVLQNSGLTETDMRFFAEEIERLAIDL

SEQ ID NO: 182 - protein, 586 aa, Drosophila virilis
MLASETFPTHHFKNSIYKPYNGASSAPDVEDLASMAKTLTTTTLSSSDAAVIDVVKTTVEYGNPNKMLNSSVSSSSNSNNKNNNIKNTNGNVNGLASFVASHPAAEFEGFIRACVDEIIKLAVFQGTNRSSKVVEWHEPAELRKLFDFELREKGESPDKLRQLLRETIRFSVKTGHPYFINQLYSGVDPYALVGQWLTDALNPSVYTYEVAPVFTLMEEQVLAEMRRIVGFPNNGHGDGIFCPGGSIANGYAISCARYKYAPESKKNGLFNAKPLIIFTSEDAHYSVEKLAMFMGFGSEHVRKIATNELGKMRLSDLEDQIQLCLDNNWQPLMVSATAGTTVLGAFDDLVGISELCRKHNMWMHVDAAWGGGALMSKKYRQLLNGIERADSVTWNPHKLLSASQQCSTFLTPHAQILGQCHSTNAAYLFQKDKFYDTSFDTGDKHIQCGRRADVFKFWFMWKAKGSKGFEAHVEQVFEMSEYFTAKLRERPGFELVLEKPECTNITFWYVPPSLRQMERNQEFFDKLHKVAPKIKEAMIKKGSMMITYQPLRKLPNFFRLVLQNSCLEESDMLYFLNEIEDLGQNL

SEQ ID NO: 183 - protein, 547 aa, Nasonia vitripennis
MPAHEETQLQEGSAIEALERPRSADSEKHSRLDYEREEEAHQIGEDSDEGYAMDNFNEEGFFCSLPGRESHEKFIRDAVEMILREAVFKGTSRKNRVVEWIEPATLPSKIDLPPRKTGESHEALLRLLDSVIRYSVKTGHPHFVNQLYSSVDPYGLVGQWLTDALNPSVYTYEVSPVFSLMEEAVLKEMRAIVGWQNGEGDGIFCPGGSMANGYAINLARHWMFPIVKEQGLTAVPRLVVFTSEDAHYSVKKLAAFLGIGIANVYSVKVDESGKMCVSDLRAQIDRAIQEGARPLMVSATAGTTVLGAFDPLRSIAELCREHNMWFHVDAAWGGGALVSPKHRHLLDGVELADSVTWNPHKLLAAPQQCSTLLTRHKGLLQSAHGCKATYLFQQDKFYDTSYDFGDKHVQCGRRADVLKFWLMWKAKGTDGLEKHVDRVFQLSRYFVGIIRNRPGWQLLFEPECTNVCFRYVPPSKRHLNGQDLFQALHKVAPLVKERMVKTGSMLITYQPIREQANFFRLVLQNSGLTEADMHFFVEEIERLSEDL

SEQ ID NO: 184 - protein, 508 aa, Bicyclus anynana
MPADSNIIVAVEEKKEDGLFQSLTERSKHEDFIRRAVDLLVERVVFGRASRTSKVVEWSAPEDIKQAIDLKVRDGPASHEELLAFMADVARYSVNTAHPYFVNQLFSSVDPYGLIGQWLTDALNPSVYTFEVAPVFTLMEEEVLREMRSIVGWADGEGDGIFCPGGSIANGYAISCARSYFYPEIKNKGVYAVPKLVIFTSELAHYSTKKMAVFMGIGSDNCILVKADENGRMDVNDFERKINEAIEAGATPFLVTSTSGTTVYGAFDPIVPISNICKKYNLWLHVDAAWGGGALMSRKHRNLLNGIEADSVTWNPHKLLAAPQQCSTFLLKHKNVLKEAHSSNAQYLFQKDKFYDTSYDTGDKHIQCGRRADVLKFWFMWKAKGSEGFEKHVEKLFDNANYFLEHIRQREGFRLVIPKPECTNIMFWYIPKCLRSCENEPNYYERLHKVAPKIKERMIKEGSMMVTYQPQGNLVNFFRIVFQNSALDHKDMIYFANEFERLGSDIVV

SEQ ID NO: 185 - protein, 543 aa, Harpegnathos saltator
MPANEDTSNESLERIEPGRISPSLSQRKMSGGLQNLASSLLPGATVDDDLESSRVEERNFRSIPRRDIHEKLFRDFFELVLQQAVFQSTSGKERVVEWMNPSDLRSVVDFSLPAEGVSHEELLALTRNVIKYSVKTGHPHFVNQLFSSLDPYGLLGQWLTDALNPSVYTYEVSPVFSLMEEDVLREMRRIIGWKGGEGLFCPGGSMANGYAINLARHHRYPNMKQTGLSQMPRLVIFTSEDAHYSVKKLAAFLGIGYDNVYSVKVDSRGKMLVSDLEAQIARATREGAVPLMVSSTAGTTVLGAFDPLKDIAEVCRKHRLWFHVDAAWGGGALVSRTYRRLLDGVELADSITWNPHKLLAAPQQCSTLLLRHEGLLQSAHGCGASYLFQNDKFYDSSYDCGDRHVQCGRRADVVKFWYMWKAKGTRGLEEHVDHVFALSRYFADLVRTRDGWHLLAEPECTNVCFRYIPPSMRDLAGRQLDQAIHKVAPMIKERMVRAGTMLMTYQPLRGTPNFFRLVLQNSGLSEIDMQFFVEEIERLAADL

SEQ ID NO: 186 - protein, 548 aa, Acromyrmex echinatior
MPANEDTSNDETSLRMKHERAGPSMESSWRKMSEEHPRANPSPIPNLPGLVNGIEERQGIEKWDFRSMPRRDAHEKLFRDFFELVLQRAVFQPTSGKDRVVEWVDPYDLRSVVDLSLPAEGVSHEKLLTLTRDIIKYSVKTSHPHFVNQLFSSLDPYGLLGQWLTDALNPSVYTYEVSPVFSLMEEDVLREMRAIISWQEGEGLFCPGGSMANGYAINLARHHRYPNLKQSGLSQMPRLVVFTSEDAHYSVKKLAAFLGIGYDNVYLVKVDSRGKMMVSDLEAQIARAVEEGAAPLMVSATAGTTVIGAFDPLREIAEVCRKHELWFHVDAAWGGGALISETYRGLLDGIQFADSVTWNPHKLLAAPQQCSTLLLRHEGLLQAAHGCGASYLFQNDKFYDASFDCGDRHVQCGRRADVVKFWYMWKAKGTRGLEAHVDRLFALSRHFTDLIRTRDGWHLLVEPECINVCFRYIPPSKRHLTGQELEQALHKIAPIIKERMVRAGTMLITYQTLRNMPNFFRLVLQNSGLTEADMKFFVEEIERLAMDL

SEQ ID NO: 187 - protein, 544 aa, Camponotus floridanus
MPANEDTSANDFAFKRIKPERANPAESQPKMSRKDDSSTNLILSNFTASVEERKEAEKGDFRSIPCRSVHEKLFRDFFELMLQRAVFQSTSGEERVVEWIDPNNLRSVVDLSLPTEGVSHEELLTLTRDIIKYSVKTGHPHFVNQLFSSLDPYGLLGQWLTDALNPSVYTYEVSPVFSLMEEDVLREMRAIIGWQGGEGLFCPGGSMANGYAINLARHHRYPNLKQSGLSQMPRLVVFTSEDAHYSVKKLAAFLGIGYDNVYLIKVDSRGKMVVTDLEAQIVRAINEGAVPLMVSATAGTTVMGTFDPLKKIAEVCRKHGLWFHVDAAWGGGALVSRTYRGLLDGIQLADSITWNPHKLLAAPQQCSTLLLRHEGLLQEAHGCGASYLFQNDKFYDATFDYGDRHVQCGRRADVVKFWYMWKAKGTRGLEAHVDCVFALSRYFADLIRTRDGWRLLAEPECTNVCFRYIPLSKRHLTGRELDQALHKIAPMIKERMMRAGTMLITYQTLRDMPNFFRLVLQNSGLTEADMKFFVEEIERLAVDL

SEQ ID NO: 188 - protein, 532 aa, Pediculus humanus
MFPVISTQKQSFGIINLSLLEDNNFLIKTNSVVDKSDKEDEKLNQKHWSLPLEKYHYDFIVKCVGIIMKEAVFDGTNRNSKVVQWQDPEKLKKSFDFSLNKYSETEGKLLHLISTIIKFSVKTGHPYFVNQLFSGVDPYGLIGQWLTDALNPSVYTYEVSPVFSIMEEVVLEEMRKFIGFPNGKGDGTFCPGGSISNGFGISCARYHLFPQVKKLGIYGIGLRLVLFTSRDAHYSIVKLATFMGLGSDNVISIKTDESGKMKPEELEKAILKVLQEGGTPFMVSATSGTTVLGAFDPLDSIADICEKYKLWFHVDAAWGGGCLMSSIHKKKLQGIHRTDSVTWNPHKLLGVPQQCSAFLTKHKNLLKNVHCAKATYLFQKDKFYDVKYDTGDKHIQCGRRADVLKFWFMWKAKGSSGFEKHINKIFETALYFKKSIENKPDFQLVLSEPECTNICFWYIPPRLQNSKYNNDDLNKVAPRMKEKMMKDGSMMITYQPLRHLPNFFRLVIVNSGLDTHDMDRLITIIQNAGASI

SEQ ID NO: 189 - protein, 549 aa, Atta cephalotes
MPANEDTSNDETSLRMKHERADSSAESSWRKMSEERPRANSSSLTLNLPGLVNGTEERQRAEKRDFRSMPRRDAHEKLFRDFFELVLQRAVFQSTSGKDRVVEWVDPYDLRSVVDLSLPAEGVSHEELLTLTRDIIKYSVKTGHPHFVNQLFSSLDPYGLLGQWLTDALNPSVYTYEVSPVFSLMEEDVLREMRAIIGWQGGEGLFCPGGSMANGYAINLARHHRYPNLKQSGLSQMPRLVVFTSEDAHYSVKKLAAFLGIGYDNVYLVKVDSRGKMMVSDLETQIAQAVKEGAAPLMVSATAGTTVIGAFDPLREIAEVCKKHGLWFHVDAAWGGGALVSGTYRDLLDGIQFADSVTWNPHKLLAAPQQCSTLLLRHEGLLQAAHGCGASYLFQNDKFYDASFDCGDRHVQCGRRADVIKFWYMWKAKGMRGFEAHVDHLFALSRHFTDLIRIRDGWHLLVEPECINVCFRYIPPSKRHLAGQELEQALHKIAPIIKERMVRAGTMLITYQTLRNMPNFFRLVLQNSGLTEVDMKFFVEEIERLAMDL

SEQ ID NO: 190 - protein, 497 aa, Daphnia pulex
MENPALIGWFQTEPSQEQHEQFMRKVMDIVLKEAVFEGTSRNNLVIEWMEPESLLTLLGKELPKNPQSDETLVELIKNVVRYSVKTGHPHFINQLFSSLDPYGLVAQWVTDSLNPSVYTYEVAPVFTLLEHQILREMRRWVGFPDGSGDGVFCPGGSMANIYGIQCARHRAMPSLKETGTFGSPRLVVLTSKDAHYSVKKACFLLGIGVSNLYLVDVDTSGRMDLVHLRQEVQRALNENARPFMVSATAGTTVLGATDPLDGIADICQEFGMWMHVDAAWGGGALMSTKHRHILKGIERADSVTWNPHKLLGVPQQCSTFLTRHADLLLEANSASASYLFQKDKFYDPKWDVGDKYLQCGRRADVLKFWLMWQAKGSLGLEKHVDTLFENVAYFTSFIRNRKGFQLVLEEPPFVNVCFWYIPPSLQGAQHDEDYEEKLHKIAPKIKERMIKKGSMMITYQPLRNLPNFFRLVLQSSAVTIDDMEFFAEEIERLGCDL

SEQ ID NO: 191 - protein, 581 aa, Lottia gigantea
METKRFDNMSINDEATKEQFNELKQRLLEGKSLKSKQVSKVMIDVDSESEDSALSLQDSSANTDESDPDESNVETCTTQLQHSQRVNSRRKSTKAKFLTIPQVHHDDFLSDTFDLIMKEIVQKAGDRSQKVVEWKAPEELRELMDLDPTAVGETHEKLLMRLQDIIKYSVKTGHPRFVNQLFSSLDPYGLAGQIVTDALNTSQYTYETAPVFTLMEETVLKTMRTCIGYTEGNGIFCPGGSLSNIMAVNCARHFMFPQTKKTGMFGLPPLVIYTSELAHYSIKKAGYLLGFGDDNVKLVKTDELGKIIPEDLERQIQETIDEGCTPFMIVATAGTTVFGAFDPIDKMADVAQKYGLWYHVDGAWGGGVLMSKKHRDMMKGVDRADSVTWNPHKLLGVPQQCSCFLTKHVNILQQCHRADAKYLFQKDKFYDTSYDTGDKTFQCGRKVDVLKFWLMWKAKGSEGFEQHIDKLFDNTRYIVEKLKQREGFRMVVNEPDCTNVCFWYVPPSLRNMPEDEEFWNRLHTVAPKVKEGMIRDGTMMITYQPQKDLVNFFRLVLQNSATTYEDMDFFIDEIERLGKFL

SEQ ID NO: 192 - protein, 538 aa, Branchiostoma floridae
MSNILTSLEDSSFSCSCAKEMINGGIDGHLNDCSVRNLKSSLNDDTANVKAPKKDPLPKDEEDFLKAVFQVILEDGVRKGRDITQKVVDFHQPDELRTLLDLEIRDTPEDHQALIKHMKDTVKYSVRTSHPRFFNQLFSGQNTYALAGQWLTETLNTSQYTFEVAPVFTIMENVVLHKMRDIVGYSGGDGIFCPGGSISNLYALNVARYRYMPDIKKTGLFGLPRLVVFTSKQSHYSIKKAASVLGIGTNNVVLVDCDERGKMIASDLEAQILRVKAEGAVPFFVNCTSGTTVLGAYDPLDEVSDICEKHGLWMHVDAAWGGGVMMSPKYRASRMRGVERSDSITWNPHKMMGAGQQCSAFLLKHENLLQHCHEAKAKYLFQQDKFYDVSYDTGDKSIQCGRKVDVFKLWLMWKAKGSQGFHQDMDAIFDKTRYLVEKVKAREGFKMVLDEPECSNVCFWYIPPSLRGKEDEADYKDKLHQVAPRIKERMVLSGTMLVGYQPLGNKPNFFRQVFSSPSVTEEDLDFLLDEIERLGEDL

SEQ ID NO: 193 - protein, 335 aa, Meligethes aeneus
KEMRQIVGFKNGDGDGIFCPGGSMANGYAISCARYKFMPEIKQKGLHALPRLVLFTSRDAHYSIKKLSSFLGIGTDNVYAINTDEKGKMDMKHLEEEVERSIKEGGAPFMVSATSGTTVIGAFDPLEKIHEICQKYGMWMHVDAAWGGGALMSKKHRYLLKGIEKADSVTWNPHKLLTAPQQCSTLLLKQDGILSAMNSANATYLFQKDKFYDTKYDIGDKHIQCGRRPDVIKFWFMWKAKGTSGFEQHIDKVFENAKFFTDTIREREGFEMVIPEPECTNICFWYVPPSLRNRKSDPDYQDKLHKVAPKIKEKMMREGTMMVTYQPLRETPNFF

SEQ ID NO: 194 - protein, 401 aa, Solenopsis invicta
STSGEDRVVEWVDPYELRSVVDLSLPAEGVSHEELLKLTRDVIKYSVKTGHPHFVNQLFSSLDPYGLLGQWLTDALNPSVYTYEVSPVFSLMEEDVLREMRSIIGWHNGEGLFCPGGSMANGYAINLARHHRYPHLKQTGLSQMPRLVVFTSEDAHYSVKKLAAFLGIGYDNVYLAKVDSRGKMVVSDLEAQIARAIEEGAAPLMVSATAGTTVIGAFDPLKDIAEVCKKYGLWFHVDAAWGGGALVSAAYRGLLDGLHLADSVTWNPHKLLAAPQQCSTLLLRHKGLLQAAHGCGASYLFQNDKFYDASFDCGDRHVQCGRRADVVKFWYMWKAKGTRGLEAHVDRVFALSRYFADLIRAREGWHLLVEPECTNVCFRYVPPSKRHLAGQELDQVLHKVS

SEQ ID NO: 195 - protein, 555 aa, Crassostrea gigas
MASCMTESFKVHSCAHKRIHDKNDFEVEPTEKQRITMLSDKPVRKSNKENSMCNVTIKTKESHSENHKKHEKKAPKQEKAKHEFLDKLYEMMIKDGFMKARDRNEKVVEFSYPEELKQKIDFDLGSKTSDEKILSLCQDIIKYSVKVAHPRFFNQLYGGLDEYSLGGCWLTETMNASLYTYEVSPVFSLMERVVIDKMLGKIGFEDGDAMFCPGGSISNMYALNIARYFKYPEVKKKGIKGIPDICAFTSEKCHYSIGKGVAFMGMGLDNLINVKTDANGKMIPEDLEKKILEAKAEGKTPYFVNATAGTTVFGAFDPIDEIADICQKYNLWMHVDGAWGGGALLSKTYSPLLKGVERADSMTWNPHKLMGVPQQCSLVFTKHKGLLEQCHSANASYLFQQDKFYDVSYDTGDKSIQCGRKNDVLKLWIMWKNKGDEGFERDIDNQFECAKYLAQLVQEREGFELMLEPQCTNVCFYYIPKRLRGLERTPEWWNEISKVGPKVKEGMMKAGSMMVGYQPDGDFVNFFRMIISNLDTVKSDMDFVVDEIDRLGKDL

SEQ ID NO: 196 - DNA, 1065 bp, Candida albicans
atgttaagaacttcaattcgtgctttttctactcaaccaagattatcaaccaattacgggtttattggtttgggacttatgggccaacacatggcaagacacgtctataatcaattagaaccaagtgataagttgtacgtttacgatgttgatccaaaacacacaactcaatttttaacagaagtgacttcccaaaccccacaaaatgcacctttgctcaccccgttaaactcgttgaaggattttactactgaagttgattcacaattagatttcattgttaccatggtgcctgaaggtaaacatgtgaaatcagttgtgtccgaattggttggtcattataaatcaactggtaattatgatccaagtatcaaaaccactttcttggattcttcaacaatcgatatcccaacctcaagagacgtacaccaattggttaagtcaagtattcctgaatttgactttattgatactccagtgtctggtggtgttgcaggagcaagaaagggaacattgtcatttatgttgtccagagaaacccatgatgatattgatccaagtttaaccgcattgttatctaaaatgggtatcaacattttcccatgtggtgctactcatggtactggtttggctgctaaattggcaaacaattatttattggcaatcacaaacattgctgctgctgattcattccaattggctaaatcatttggcttgaacttgcaaaactatgctaaattggttgctgtttctacaggtaaatcttgggctagtgttgacaattgtccaattccaggtgtttatccagataacaatttaccaagtgatgtcaactatgaaggtgggttcattaccaaattgactagaaaggatgttgttttggctactgaatctgctaaattcaacaatagattcttgatgctcggtgacattggtagacattggtatgataaggcttgtgaaagagaagatattgccaatagagacttgtctgttctttttgaatggttgggtgatttgaaacaaaatgaaaaaggtgatgtaattgatgtcaaaagaaaataa

SEQ ID NO: 197 - protein, 354 aa, Candida albicans
MLRTSIRAFSTQPRLSTNYGFIGLGLMGQHMARHVYNQLEPSDKLYVYDVDPKHTTQFLTEVTSQTPQNAPLLTPLNSLKDFTTEVDSQLDFIVTMVPEGKHVKSVVSELVGHYKSTGNYDPSIKTTFLDSSTIDIPTSRDVHQLVKSSIPEFDFIDTPVSGGVAGARKGTLSFMLSRETHDDIDPSLTALLSKMGINIFPCGATHGTGLAAKLANNYLLAITNIAAADSFQLAKSFGLNLQNYAKLVAVSTGKSWASVDNCPIPGVYPDNNLPSDVNYEGGFITKLTRKDVVLATESAKFNNRFLMLGDIGRHWYDKACEREDIANRDLSVLFEWLGDLKQNEKGDVIDVKRK

SEQ ID NO: 198 - DNA, 1020 bp, Candida albicans
atgaccaactacggtttcatcggcttgggtttgatgggtcaacacatggcaagacacgtctacaaccaattggagccatccgacaagttgtacgtctacgacgttgacccaaagcacactacccaattcttgaccgaagtcacctcccaaaccccacaaaacgcaccattgttgaccccattgaactccttgaaggacttcactaccgaagttgactcccaattggacttcatcgttaccatggttccagaaggtaagcacgttaagagtgttgtttccgaattggttggtcactacaagtccaccggtaactacgacccttccatcaagactaccttcttggactcctcaaccatcgacatcccaacctccagagacgtccaccaattggttaagtcctccatcccagagttcgacttcatcgacacccctgtctccggtggtgttgcaggtgctcgtaagggcaccttgtccttcatgttgtccagagagacccacgacgacatcgacccttccttgaccgcattgttgtccaagatgggtatcaacatcttcccatgtggtgctacccacggcaccggtttggctgctaagttggcaaacaactacttgttggccatcaccaacattgccgcagcagactccttccaattggccaagtccttcggtttgaacttgcaaaactacgcaaagttggttgctgtttccaccggtaagtcttgggcttccgttgacaactgtcctatcccaggtgtttacccagacaacaacttgccatccgacgtcaactacgaaggtggtttcatcaccaagttgaccagaaaggacgttgttttggcgaccgaatctgcaaagttcaacaacagattcttgatgttgggcgacatcggtagacactggtacgacaaggcttgtgaaagagaagacatcgcaaacagagacttgtccgttttgttcgaatggttgggtgacttgaagcaaaacgaaaagggtgacgttatcgacgttaagagaaagtaa

SEQ ID NO: 199 - protein, 339 aa, Candida albicans
MTNYGFIGLGLMGQHMARHVYNQLEPSDKLYVYDVDPKHTTQFLTEVTSQTPQNAPLLTPLNSLKDFTTEVDSQLDFIVTMVPEGKHVKSVVSELVGHYKSTGNYDPSIKTTFLDSSTIDIPTSRDVHQLVKSSIPEFDFIDTPVSGGVAGARKGTLSFMLSRETHDDIDPSLTALLSKMGINIFPCGATHGTGLAAKLANNYLLAITNIAAADSFQLAKSFGLNLQNYAKLVAVSTGKSWASVDNCPIPGVYPDNNLPSDVNYEGGFITKLTRKDVVLATESAKFNNRFLMLGDIGRHWYDKACEREDIANRDLSVLFEWLGDLKQNEKGDVIDVKRK

SEQ ID NO: 200 - DNA, 23 bp, Issatchenkia orientalis
cgaaccaattcaagaaaaccaac

SEQ ID NO: 201 - DNA, 25 bp, Issatchenkia orientalis
ctccttcatttaactataccagacg

SEQ ID NO: 202 - DNA, 20 bp, Issatchenkia orientalis
gaagggggtccaagttatcc

SEQ ID NO: 203 - DNA, 21 bp, Issatchenkia orientalis
ccaacaatcttaattggtgac

SEQ ID NO: 204 - DNA, 20 bp, Issatchenkia orientalis
gatatgggcggtagagaaga

SEQ ID NO: 205 - DNA, 20 bp, Issatchenkia orientalis
gctccttcaaaggcaacaca

SEQ ID NO: 206 - DNA, 20 bp, Issatchenkia orientalis
tgattccttcaatcacaggt

SEQ ID NO: 207 - DNA, 25 bp, Issatchenkia orientalis
gcatgtctgttaactctcaaaccat

SEQ ID NO: 208 - DNA, 20 bp, Issatchenkia orientalis
agggtaccttagtacgaagg

SEQ ID NO: 209 - DNA, 20 bp, Issatchenkia orientalis
ctattcttacgatgaaggcg
